United States Patent Application Publication US 2011/0014706 A2 - sequence listing, part 59

SEQ ID NO: 191705 - DNA, 114 bp, Arabidopsis thaliana landsberg
atgcatgatgactacacatcaattaatgttagaaagcgcaaggagacaagagcggaatgcttaacccaagcacgcacgcacagctcgatcgatgctgcaagagtgcatccctac

SEQ ID NO: 191706 - DNA, 424 bp, Arabidopsis thaliana landsberg
cgaaagaaaaagcaatgccgtattgatccgtgagttgacactcactgctatcgacaaacacaacgaagctcatggaaccaaacttgtgtttgtggagcatgttgaggcaaattaccaaatgaccagcggtcttacctgctggttaacattttgggctacagatatggcctcttcccctccacagtctaaaatctatcaagcacatgtgtggcgtcgcggacaaaactttcacacttttatattcaggctcaagcccacagatgaagagattgaagctgttgaagtgcagccaccgtctcccatgctttatgaattagataaaccaccgattgtcttttctcgacctggtcctgaagatgaagcattgcctggtgtcccctttgtcttcaatcgaactggagctggtcttgatcccgattggtag

SEQ ID NO: 191707 - DNA, 90 bp, Arabidopsis thaliana landsberg
atggaagaagctggctttctcaattgtgtatccgttcctgatggagctccagcgaaggtttcttcgaaggaaatcccatcggaagacaag

SEQ ID NO: 191708 - DNA, 228 bp, Arabidopsis thaliana landsberg
gaacaacgcagccgaaaggaagagcagttttttgcggcccagtctatcgctcagatcacccgaaaaagcgaccccggcaatacagcccaccagggcagacgaaacaaaccagccttcctgcaccggagtcaggctaaactgtttttccacaaaaggcagcactccggatattacagccatatcaaaaccgaacagcaagccgccaagagatgccaccacagtaattaa

SEQ ID NO: 191709 - DNA, 378 bp, Arabidopsis thaliana landsberg
atatcttcagagaagaaagaatggggttatatgttcatcaacgaaacccaaatacaaatcctcaggacaacaatctagaaataaaaactcatttgaaaaaaatgattcttgatttgggttttccttgttttgttcctcctcgaaccagctctcgtgaggacaacaaagcttggcttctggctgaaacagagccgaagcttattgactcagaacaacattcgttgcagtcttcgtttaggtttagtctttgctcacagttggagctggagaagattaaaaaggagaaaccttcgttgtcttatcggaattttccagtgtctgaaggatcagagacggttctgctagtgaatctggagaatgagacaggagaattgacag

SEQ ID NO: 191710 - DNA, 129 bp, Arabidopsis thaliana landsberg
atgtgtctagcagctcattatatagatgaggattggaagcgacataagagaatcatcaatttctgcataagtgataatcatgttggtgaaacaattggtagaatgcttgagaagtgcttggtttttttg

SEQ ID NO: 191711 - DNA, 183 bp, Arabidopsis thaliana landsberg
atgagctctccgcttgaatcgtatgccgctgcgctggtcccgtccggaacggcgagagatgaccacgacttcccgccatcgacgctcttgtcggcgccgtccatccccagtgcgaggattttgtgccctgtggagtcgacggcgaccgccattgcccccatcgaactgcccagcgcggtccag

SEQ ID NO: 191712 - DNA, 86 bp, Arabidopsis thaliana landsberg
ccttcctgaaggctaaatccactctgtcaataggaaactcgtcgattgattgttctttgctcgaggtggccgcggtggatgtacag

SEQ ID NO: 191713 - DNA, 381 bp, Arabidopsis thaliana landsberg
atgcctaacgaggtccccatgagcttccgtctcacctacgccaccatgtacgacccgccggaagccatgcacgaacgcttcgaggcggcgctggcccgcgtctcggttacgctcggcgcgcgccacggcctgttcatcgatggccgcgacatcgaggcagagcactcggccgaccgccgcgccccgttcgacaacaccctgcacctgggccacttcgcgctggccgacgaagccgatgccgaccgtgccatgcgcgcggcgcaggccgcctaccccgcctggcgcgccaccccggtggccgagcgcgcgcggctgatgcgccgcgtcggcgatctgctggaggagcgcgtctacgacgtcgccgccgcgctggtgctggag

SEQ ID NO: 191714 - DNA, 140 bp, Arabidopsis thaliana landsberg
cggaattcgtacggattccaagaacattggattagcggattcggcgagaagagctgccagaagtcttgtggttactcggttttcgaatgaatttgaggatgaagaagcatcttcatcttcacaggagtctgcaattcaag

SEQ ID NO: 191715 - DNA, 731 bp, Arabidopsis thaliana landsberg
cctcaacccaccaagcgacttcgctttggtggacgctctcacagaggcgagtccaaaccctctggggtatcatatgcggtcaccctgggactggctgacggccatctcgacctatgggccctcggggtccgaggaagatgacgagcccgatttctgttgggattctccggacttggtaacccagtgccatgcgggactttatgaccgcgtgcgactactgcctttccgactgtttcgacggtagccgcagcctcggcgacgaggactgcggccaagccatgaatgttccatgtcgatctaggggtctcgacgaaggcaaccatcttggtatgccagagaacggtgatccccctaggcctgcgcctcgcgttgacattcttcgggagctagctgtggtcccaagtcttgcggggggtcaggatgcacagctcgagcaaatccgcgaggtataggccaggctcgacgaggaagcaggacaacttgtgcggcttcggcaaaatataaggcaggagtgggcaggccgagcaccggccggagaagcgcgtcatctggcccaggacgtccagcaccacatcgccgacgatgccagggcaaggctgccccccgcttctagtggggtcggccagaacctggctgcagcagcgacactactccgagcgatgccggaaccatctaccaccgaggggcggcgtatccagggagagctcaagaatctcctggaagatgccgcg

SEQ ID NO: 191716 - DNA, 433 bp, Arabidopsis thaliana landsberg
aaatggcagtaactcggttcggaagtcacctagaggctccaggtctccgacaagaactgttaacttaggaaagaagtcagcgtcgatttctcctattagaaatacgggaaagaggtctccaaagctatcaactgctgctaagctcagaagatcatttactcctacgagaaatggcagtaacttggctcgtaagtcgtctatttctccgaaaagagtcacacttcaagcatttctttctccaacaagaaatggtaacttttgtaagaagtcacccaaagcttcgatttctccaactagggtgtgcaacaagtcgcagaagctgtcaacggctgcaaagttcaggaggtcattttcgccatcgagactagctatgaggtttgtatctccaatgaagagcaggaaaagtgtagccaagtgcgatgatcatgagatg

SEQ ID NO: 191717 - DNA, 72 bp, Arabidopsis thaliana landsberg
atgaagtgcagtacgatgacagtcgtacgcgcgagagacgctacgtgtgcggtttgccgcgtaatcgtgcag

SEQ ID NO: 191718 - DNA, 463 bp, Arabidopsis thaliana landsberg
atgaatatcctatgcatggatctatgcaggaatatgatgttgaggactcaatcctgccactccaaccatctttaaattatactgcacctgaattggtgcggagcaaaacttcttcggctggagtttcttcagatatttttagtttcggatgcctcacttatcatttagtggcacggaaaccattgtttgattgtcataacaatgtcaagatggtattgctaaaacccaagctcattagtatctgttttagatgtctttacatattgtcctgtagaaagtggtataatatctgttcttgccgtcactgatgatggttaccttgcaatttttttgcagtacatgaacacattgaactatttaacaaatgaaactttctcatctataccctcggacttggtatctgatttacaacggatgctatcaatgaacgagtcatatagaccaacagctttagatttcacag

SEQ ID NO: 191719 - DNA, 560 bp, Arabidopsis thaliana landsberg
aggatttgaatgcagaaaaggaaagcttagtcgtgaaggaaaatgttgtagatgaagaagaggcgggtaaaggaccgctgaaagctagtaacaagtcaacaggaggttcttcatggcttcagaaggcttcgtggactcagctggttagcgacaaaaatacttcttcattcagtataactcaactcttcccagatttaacttcagacaagggcgaagcagctggagtgatcaacaatgtaggaaaccagttctccaactctaaccagactgcaagtgcaatgaaacaaacagattacgcatctagcagcggtggttttgtggctgcgggagtccctgtggatagtacccctgtgagaagtttagatgagaatcggcagcgtctgaatggtaagaatgtgagtgaaggagctaaattgggtgcgaagaagaagataattaagagaaaggttgggtcgggggatacttgcacatttatgagaagctcgacttctttgaaagagtgggcaaaggctaagaaggcattgagtgagcccaggagaaagaaaaatagcgaagaatga

SEQ ID NO: 191720 - DNA, 222 bp, Arabidopsis thaliana landsberg
atgaggtttcttgaattctatgaggaacagaaattgaaatttgagtacctgacaagcttggacgagtacaacaatggaggtcatgaactctcaaaacttgtcttgctgtatccgaagaagaaactacgactgttgggactcttccaagcatcaaatgcatcaccggaccatacttctttgagagtttccatagagtctgatgcggtaattctccgatctgat

SEQ ID NO: 191721 - DNA, 759 bp, Arabidopsis thaliana landsberg
tggaacaggatggcccgcataaagcggcccgtcggcacaccgaatccccgctcgtggaaggagacgaagctcacgacgtaccccggcggtggggacggagcgtcgtccgccctcgggaggaatccattctggtcgctgcttatcggtgagggggcgaagcaacccctcgccgaccagctcctccaggtcgctcgccgtcaccgtggaaaagggccacggatcgcgcggggagattatggtcacccgatcagccatcaccaagcagaagaggtggcggcggagaggatgaggtgcacggtttcctttctctggctattcccttgggttgcgaaaacctaagtgggaggcgagcagcagagtagaaaaccgccaccgatccctccctcaaatatatgaaggcccaggcaagacccgttcaacacttcgcccgaacccgccacgagattcaaaactcaacgcgagacgcccgttcctcgaacggctcgcgcacgcgcaacggctgccccgcgaaccactcgccccatcgcattaactctgcggcaggacaggcgacgcttctggcaggagaagcgggcgacgcttcgccttcgccgtaataacctcgccaaaaaaggtacgccacgtcgttcgatttcgtatccttttcctttttttcctctttctctatctcttgcaacagggaccgggaaagggggataccccgaaaaggatccttccctgtgaaggaaccaggctccgagccccccctactgatcaaag

SEQ ID NO: 191722 - DNA, 209 bp, Arabidopsis thaliana landsberg
tgatgcttatagatggatctcaagaaccggtaccgttcacgaagcagccggagatcgacatggtgaccagtagcaaactcaagagccaatctatgaagagcttcaagctcactacatactgccttatgaaagaacaagaaaatcaggatcggagaaatctcttccgcgtcatccgagaacgaattcgccacaggcaacggacgagatga

SEQ ID NO: 191723 - DNA, 248 bp, Arabidopsis thaliana landsberg
atgactacgactttgtgcactgcggaggagtatatagaaaacttcgccgtttcatcgccggagatggggagtttttggttattggcggagtcagtctccatatcttattataccttattgtgtctttttttgtacatctatcgtattattctcttttgttttcttgaccttacgatagctatgcgacgttttatagaagaggacatgccaatccattcgatcggcatgaaatgatgaccgtccgatga

SEQ ID NO: 191724 - DNA, 79 bp, Arabidopsis thaliana landsberg
atgaaagcgcgtgttaagagtattgaaacactcacacgcttgtggaggttacctgctaagtcggtcgatttgatcgatg

SEQ ID NO: 191725 - DNA, 527 bp, Arabidopsis thaliana landsberg
gcatatcctattgggactcatcccaattgggtctttataaaatcctctcccatgtactcgtctccaacccgctttcatatcttaggtaagttacggcaggtcagcccgcactggtaggaattggcctaaatcaaacccacaagtctttaggaagaatactcaaacctaactatgaaatactcaaacataatttatgtgaatttggatgcccttaggtcttataaagaatttgtttctttcgctcataatctaagaaaacataatttcacattgcaaccctaaaacctaactatgaaatactcaaacatataattgaacaaacattaaagcacctcatcaatgaaaagaacttcataaatctatggaaaagatgtaaactcattaatcttaatgagatagatttataaagattgattataaaggatgtatacacgttttagcaactacctatcttttctttaggtaagaataagggatacatacgagcttatcgattacaagtttggtacttgtatagtttcacttga

SEQ ID NO: 191726 - DNA, 1164 bp, Arabidopsis thaliana landsberg
atggcctctgatagagaagagtttaacttgtgtggacctacacacctcacaactgttgattggtatgtttggattgttaactcaagatcaaacatgtagttagacttatgaaatggattcttgagatatgtctttgtgtttttttacaggggaaatgaagatcaccaacgttgtgtagcagcttgtttggtacaaggaatctatatagtagagcaagaccgtcagcttaaacgtgaaggcactgaagctcttgcatctccatggtgggaatcattcaactttaaattgatccgtcaccttaaagacgatgctgatttctccatctttggtggcatttttgaatacaaatcgttacagccagatgttgtggactctggagttccacggtatgttatagcctttagagggactttgactaaagcggattcgataacccgtgatatcgagttggatatccatattatacggaatgggcttcaccgaacgtcgcgttttgagatagcgatgcaagctgtgagaagtatggctgattctgtgggagcttcgagcttttggcttacggggcattctttaggtgcagcgatggcgcttcttgctggtaaaacaatggggaagagtggagtttatattaagtcattgttgtttaaccctccttatgtgtctcccccgattgagaggatagcaaacgaacgggttaggcacgggattagattcgcggggagtctaatcaccgcaggactcgctctctctagaactcttaaacaaacacagcagccgcaacaacagcaactgcaactacaaaacttgactgaagatccactagaggcattatcttcgtggctccctaacatacatgtaaatccaggggaccatctatgttcggagtatatcgggtttttcgagcaccggggaaatatggaacagattgggtatggagccggaattgtggagcggatggcgatgcagcattccttgggaggtttgttgatggatgcgatgggagtgagcaatgcagttgaagtagaagagccggttcatgtcatcccatctgctaatcttatagtaaacaaaaccatatccgaagattacaaggacgctcatgggatacaccaatggtggagagatgaccaagatttggtttcccacatttacatgtacaaatag

SEQ ID NO: 191727 - DNA, 118 bp, Arabidopsis thaliana landsberg
atgacatcaaccggcgcgggagtattctccgccgtagagcagcagtgcggtatccagtattcgggggtcgcgacaaatactggattctgctctggtggcggtggtgtcttagatacag

SEQ ID NO: 191728 - DNA, 133 bp, Arabidopsis thaliana landsberg
aacacaatcaagttacaaagtgcagatgcttatggttgggaagctttacctaacaatggtacaaggcggttttgtcaggaacatagattcgttcttggagttggtacaagaccttctaaaagacaaagatgag

SEQ ID NO: 191729 - DNA, 44 bp, Arabidopsis thaliana landsberg
atgggcgggtacgccggattcgaccgattcgtctatgcggacag

SEQ ID NO: 191730 - DNA, 458 bp, Arabidopsis thaliana landsberg
gagttaaaggctacaaagtgtggttgttggatgaagagaaatgcgtcatcagtcggaatgttgtatttgatgaagattcagtctacaagagtcttctacttgaaagtgataaagagcagatagatggggaactcagtaaagagactaccattactgtaattgacagtgttaagaaaaaggagaaagttctgtttcaggtggagctattgaggaaatcagtgacagtagtgactcagaggttgctgctacagaagaagactcacctatacagactgtaaatctcgaaaactaccagctagctcgagacagaacccgaagggttactagaccacctactaagctgtcagactatacccattttgcttatgcgttagtaatggcagaagaacttggtgaagaagaagaacctcagtgctatcatgatgcaagaaatgataaagactgggagaaatggaatg

SEQ ID NO: 191731 - DNA, 307 bp, Arabidopsis thaliana landsberg
ataatccattagatatcaaacgggtggcaactgaggtaaaccggtgccagagttgtatttctccgaatagatgatcgtgacctcacggaaatttttgtaaacgatggtgaagagccagagaaaccagagaacaagaaggaccatagcgaacgcggcagaaaccacgtagatgagcactagagcggctagaccaccgaaaagatggctcgcgtgtccaacaagcctcgggactaaccctggttgtaggcgcacgtatctggcttcgcggacacgaagaacggcgtagaacagaacgaggacacaaaaa

SEQ ID NO: 191732 - DNA, 2146 bp, Arabidopsis thaliana landsberg
atgcttttcgccaaagagtttcatgagaaactagaattagggcagactcgtcctcgagtacaaagaagagttgatgagcagcttgagcaaagagatgaagctacagatcagtactatgggcataggagctctttatctcgcaatagtcaaaggagacaccatagacgtgctaatgaaggtagagatcttttgcaagacaatgttggaggtcttaagcttaaaattccaccattccatggaaaaaatgatccagatgcttatttggaatgggaaaagaagattgaattggttttcaaccttcaacactacaccgagatcaatagggtaagagttgttgctactgaattttatgactatgctttgagttggtgggatcagctagttacttcacggagacgtaatcaagaacttccattggaatcttggtctgaaatcaaagctattatgaggaagagctttgtccctagtcactactatcgtgagctgcatctcaagttgaggaatcttacacaagagaaccgttctgtcgaagggtactataaggaaacagagactttgatgttgcgggctgatatttctgaggatagagaagcaactatgtcaaggtttcttggggtttaaacagagatattcaagacagattggagactcaatactatgttgaaatagaagagatgttacacaaggcgattctgtttgagcagcaagttaagaggaagagttcttcacgatctagttatggttcaggaaccattgctaagcctacttaccaaagagaggagagaaccagcagctataagccgattgtcagttcaagggctgaaagtaaatcatatgctgcagttaaagatcacataggaaaggctgaaatttctacatttagagttcgtgatgttaggtgttacaaatgtcaagggaaaggacattatgttaatgaatgttcaaataagagagtcatggttctcttggataatggagaaatagagcccgaggaggagaattacctagggcttgctaagctgaattaccataggtcctctggaagttgctctgaggaaatgacttcagaaaggccggctttggagtgtagttcgatgaactctggttccctgtaaaccgattgtgatatgatcatggacaacattaagaatagggagaatgaacagaagcttgaatgtgagcttgtagccgaggaaggagctaagcttgtagctgaagagaagcttgtagcagaggatgttcttgtcacaccggacgttccaatgactcgttctagagttaagctattcaaccaagccattggagggatgcttaaccacatttgagactgaccaaaggacttgagccaagtcactacctctttggttttgattcaagctgaaggacctcatcaagatggataagtgattcatgagtgccctttttccctgcatttaattttgtctcaatgggttttccaaaggaaggtttttaatgaggcttatgttttcacttcatataatccattttgatgattcaaggcccaagcccactaaaataaagagacaatttcgtggcctttgaagttgaagggttacttttgaatttcaaactttgtttttaatttctattgtgttattgatatgtctataatttgcatgttttcattgtccattcatcatcgttttgagtccagtttcgtatcattcatcactgttttatatcatttctcatcattcttgcatactgtgtatgattaggatagcttcgcatacatattgcatttctgagttgttttcaggtgatttggagctgtttgcgagtaaattggaagaaacgagccagaaccagaagatatactcgaccaccaggtcgtgtgcatccagcaccatactcgaccccctggtcgagtgactttggagccatttttcccatctactcgaccccctggtcaagtatcctcagctcaggccactcgatgacgtcactggaccctctgatcgagtatctctttgccataccacctgaccacattagaccgttcactttaccacgttactcgacccatggtggagtatcatcgctcaccaccaataccatcactcgaccaagcactcgatcacatctttggagtgtactcaaatccgcactcaaccagacaagctga

SEQ ID NO: 191733 - DNA, 52 bp, Arabidopsis thaliana landsberg
atggcacaacagtacaagttcgttttcactgccgaacaagccgcatccgaag

SEQ ID NO: 191734 - DNA, 381 bp, Arabidopsis thaliana landsberg
accacggggcgtcccagtccccgtccggtccggaggacacgggatctgagggcgtaaaggcaaccggcatcatcggcatttcggtcaggaaggcgtatgtttttcgccctcggatgcgaccaagacggataagctcgatccgagtgcgccaatgacgcccgatagtcaaaatgaagtgtgactgagagcgctatttcggatgctctgcgcaagatcagggtgggcagcacgaccgagtggcgggcggccggtctgaccgaacggcagatccgcgctctcgtccgctccgggcagctcgccaaagtccgccacggcgcttaccccgctgcggcggtgctcgcccaagcggagaaagacgccgggctacggcacgcgatcgac

SEQ ID NO: 191735 - DNA, 707 bp, Arabidopsis thaliana landsberg
agtaggtcagcaggaggtggtgatagcaaattaaagtctgcctctggatcaatgaaaaagcgaaaaaacgtgtcaggactggcgaaggtgcggagctttaccttccattgatgtttatctctgtcactttgtggtaattgaacattgtgataacaaatattttcttgtcggaccttatttcttgtacagtgctctacaaaggaaaataaattggtaaatgatgaactgatcggttgccgaatagaagtttggtggcctatggataaacggtaaggatcttttagtgactttcattgtctttattcaagttttactattctgacatccatgcaagtatggagttaatttgttttgttcccattcttagtctcgttttgttacgttgaatccatctgatgcaatcaatcattttcaacaaaatgtggttatctttttctacatttatctcaccagaagttgcatcttggtgaaataaataggttttatgaagggacagtgaaatcttatgattccacaaaacagagacatgtggtaagctatcagcattttgcttcttttttgtccttttgttgggttagttgttcaagccaactctgtactttatccatatgatattgcagatactttatgaggatggagatgttgaagtacttaacctaaagaaagaacagtgggagctcatagacactggtggaaagaccgcaaag

SEQ ID NO: 191736 - DNA, 156 bp, Arabidopsis thaliana landsberg
ttagccaccacaaatcgaaacagccgacggcaaatgccccgaggccgcagagagctgatgctgtcatcatcctctcttatgtgcattctctgtcaaaaagaagactgcagaaacagaaaggtatttttcttttctctccaggattattgtgcttga

SEQ ID NO: 191737 - DNA, 460 bp, Arabidopsis thaliana landsberg
atgaaactcctgcgaaacacgagaatacaaggaagtcccgtgaagagaaaggaaaagtaatggctaatcaggccaagaagagatcaacctctgatgccgttttgaccgacgaagctccgccacccaagaccttctgcttatctaggggtgaatctatcaaccctgatcaattttcattcaagtatgttggagatcggttcctcatgagggaccaggaagcggccagtcacctatggcgcaacttgatgctccctggggcgaatgcgcttcccaatcctgacgacttggtcctaagagaagagtaccatcagtttgccagatcatccttagaggtttatttctaacatgaccatctgttatacattttgtatattttttcatgagttctgatttaatcttgttgcttctttctcagactgccacgcttgccaacaacctgatcgccacctacgattggtag

SEQ ID NO: 191738 - DNA, 71 bp, Arabidopsis thaliana landsberg
ataggccacaatgtgattataggaaagtgttgcttgctttgtggtcaagtaggcatcgctggttcagtaac

SEQ ID NO: 191739 - DNA, 113 bp, Arabidopsis thaliana landsberg
ctaacaaagccccatttgtggatgctaacctggtcgatcaagtgtcattcttgttcctgatgtttatcaagatggttagctttcgcttcttgtcttcaaatttccgaaactga

SEQ ID NO: 191740 - DNA, 916 bp, Arabidopsis thaliana landsberg
atgagcaacaccgacgatcagagttccggcggccaagcctccaccctcgacaacattaagctgctgcttcagcagctatccgagaaaaccgacagacagcagctcgccgtaacgacgctctccgataagttcgtgtccttccaagagcgttgcaatggccagctcgccgctttagctgtaaaccattccgagatcaggtcagcacacaatgcatatgccgagcgggttgattctctttctgcaggaacggcacggactacaggagctcgaacacgactcaattttcagggcgccgcgagcccaagcgtccagaattcgcaggaagcttctggtcagcaatctccttcgcctccggttgacgtcggagcaacgtcgacacaaaatccagtcatccagtctccgtcagcgggtcttgctgcaatctcagatgagacaatagctcgggcgccggctccactagatcccgccatcagactcccgaattctaatcctcgaccagagccgagcacggtcaactcggagctgcagaaccttcaagatcaaatatgcgcaatgaacgcaaaggttcatcaggctaccacgtcggcccccgaagtggaaaaagttattgaagcaacaaggagaacacctttcacttcgagaatctcaaagctccgtattcgcgatttccgagacttcaaactccccggttataacggtaagggagacccaaaagagtatctgacttctttccaggtcatcgcaggtcgagtcccgctcgagccgaacgaagaagatgcggggctctgcaagctattctcaaaaagtttgtcaggtcccgcacttacctggttcacccagttagaagagggttcgatcgataactttaagcaactctccactgctttcattaagcagtacgggtactttatcaaaa

SEQ ID NO: 191741 - DNA, 218 bp, Arabidopsis thaliana landsberg
atgcagggtattataaaaaagtttaagttcagaggtaatgcggttgttcttaaagcacctccgtcaattgaaagagatttgatgcagcttggcttcacgacaagccttgatagaaaaattaaaggcaccaatactttggcttttgtaaataacaggaaagatctgatagcctttcttaaaaacgacctgaaaaatgttgaaccggaccgcgttttatg

SEQ ID NO: 191742 - DNA, 141 bp, Arabidopsis thaliana landsberg
gtttcggttcaagattttgctctaaaccaacttaaaccgaaccaagataattcaaactggaccgatataataaccgtattaaccacctccatcttcagtcgtaaaaagagattcgatcaacgattagctgttattcgttaa

SEQ ID NO: 191743 - DNA, 81 bp, Arabidopsis thaliana landsberg
gatatccttcgtgaaaccctaatccatcgtgaccgtatactcctcctccggtttgatgatgagtctctcgcacgttggctg

SEQ ID NO: 191744 - DNA, 333 bp, Arabidopsis thaliana landsberg
gaagtccttgaacagtcatttcgcttcttattcaacgcattcaataatgaagcagagtacgaagcattaattgttggacttaggttggcacagggagttggggctgatgaagtggtcgcctactgtgattcgcaactagttgttaaccaattcaatggtgattatgaagcaaaagattcacgaatggaagcataccttgatgtggttaaagacttggctaaaaattttaggaaattcgaactcattcgcataccacgaggacaaaacactactgcagatgcgctcgcagccctggcatcaacatccgatcccgaagtcaaaagaatcattccg

SEQ ID NO: 191745 - DNA, 99 bp, Arabidopsis thaliana landsberg
aacgacgtacgcctattggcgatggaagcaagtgaagccttcatcatcataattcataaactgcttccaaagtttatctttcacgtttctgcaaaataa

SEQ ID NO: 191746 - DNA, 488 bp, Arabidopsis thaliana landsberg
ggttctccccctacgacacgggggctgggtcccacgcgtcatacaagctgatccgaagcgcgaagaaggcgaaccgccgcacgcgagtcatgcaaccgccccacggttacaggcgttctcccatcttcgcagaaaccggtggccgaaagggtggactgccacacgacaggcatccaaccgcaccatgactgagcgccctttcggcttcgaccacacccggtggaccagcgcaagggaagcgggcccacacttcatgtaaccggcgtgccgttactgcatgcgagaaactgcaccgccacttgcgccaataccgcgcctcctcgactgcggaaccggtgtcgcgactcgaggcaaccctgcgcatggcccaacagcaccaatcgagcacatcgatcacgggtcagtcagccgcgggaggaggcgcgacggttgatatggccaaaagtgggccgactgtaatggcggcagaaagcgagcggaagatgtag

SEQ ID NO: 191747 - DNA, 163 bp, Arabidopsis thaliana landsberg
atgcacagggatagctggatgtatcatcgtcagtcttttcagcataatcctacagttactcagatccatgaaactgcacacattgcaaatcggtgttctcagaagttgcaggagctcagtagcaagaaagccaatgtgaaaaagaaacaaaatatgcagaatg

SEQ ID NO: 191748 - DNA, 327 bp, Arabidopsis thaliana landsberg
ggccggcattttaaatttgaatgcgttaataggatctatgatgagaggaatgcaacagtatggacagattatctatatggttcccaggttttctactaaacttgagtcgaataccagataattcagcaattttctcctgaatttgaattgaaagataactttgcctcttctttgtctcttttgattttgaagatggcattctacgagaacatcttggccaccgctcatcgtacaatgaatggagaagaggcagatttcttctttgttcctgttctggattcatgcattataaatcgtgctgatgatgcacctcacattaacatgcag

SEQ ID NO: 191749 - DNA, 113 bp, Arabidopsis thaliana landsberg
acgctaaatgtgctccgcatgaacgcacatctccagccggagccatatgtattctaacaatagccgaaagagatagagacccaagccatacaaagacaacagagtcaaagtga

SEQ ID NO: 191750 - DNA, 242 bp, Arabidopsis thaliana landsberg
atgcgcgacgttgcgctgcgagcgtccgcgatcgttgcgctgttgccggcgtcggcgcgcgaagcgaatatcgtcgagacgcgcgagccatcgcggcgtttgcgcgtggctcgcattggcgaccagcagcgcgagcagttcgtgcagggaggcgcgttcgacatgcacgcgcccatccatgtacagctcgccgagccgaagttccggatcaatcaggaacgcccattgcgcgcgccgatcgc

SEQ ID NO: 191751 - DNA, 150 bp, Arabidopsis thaliana landsberg
agcatcctattaagttgctaaagagagagacgccaatggctgtaaagcaaaaggtctgtgttactggtgcaggagggtttattgcttcatggctcgtcaagtttcttctctctcgtggctacactgtccatggaaccgttcgagatcctt

SEQ ID NO: 191752 - DNA, 100 bp, Arabidopsis thaliana landsberg
tgctcatgagatgaatgtcttgcaggagattgagggcgacttacctctcgttgctcatatgcagactgccttgacggtgaaactttgtgccttcttgtaa

SEQ ID NO: 191753 - DNA, 265 bp, Arabidopsis thaliana landsberg
atgatctcgtcgataaccatagtcaaattctttgatttcggagtgaaaaaccggttgagtaagtcggtgatgtatgatcggagcctctccggtacgatatcattgaacaacgatctaaagagcatcaagaatccggttaaggacgcgtacgctgagaacagcgacgatggtgataaagagatattggatattgaaggaaacatctctgttaatcgaaatccacaattatcttgcggaatttcctttgacctagctagggttagag

SEQ ID NO: 191754 - DNA, 430 bp, Arabidopsis thaliana landsberg
atggtggcagagttcaaccgtgccggcactgcctgtgctgtcggcttttatgataagttgaggatcttcgggttttctccggaacaagaccgttgggtggtgtccatggtcaaaagcatcaaaaacatgtacgctccaacatgtggttcgtggaagtatgatggcagccgattcacacttgctaacgtcactggagtggttgacatgtatgacgcttacctgaggaggtacacgtacaagggccagtttgagttcacctatgttagcccttcgcaagtaattgtgaagaggctgtccacgggtgctcgaattgttctcaagtcacattgtggctatgaaatcatcaagatcaacatttattgcgagcaatttttaatcgctcatacgcagacaacgctgctgatgggagacctcgcctcttgcatattga

SEQ ID NO: 191755 - DNA, 485 bp, Arabidopsis thaliana landsberg
atgtaatctaagtttttggaaaaaacacattctacctctgtcaaattccttctgtgtcatcacgggaccgtgcgaatcggcgtccatcggatcccacagctttagtccgaaggctgagaaagcattaaaactctttatcaacgggcctatgtttatattgggctcacaggtacatccacatgttacgtttcagtggcagatacaatagctaaaatgttttcttagaaagaaagataaaaaaatgattgcaaatttaaactgacattttactcaacatccaacaattcaccaatgcacgaaagaaaaagcgcacttattaggctctcacacagatatatgtgcaatgcacacataaaaagttatagattcatgacattgtaaattataattattgtaccctcaagtttcttccgaggtgtttcaagaatggcatatctcgaaagagcctctccaacgttgaaagaaacactcctcaagatataccg

SEQ ID NO: 191756 - DNA, 119 bp, Arabidopsis thaliana landsberg
agagtattgagtatgcagcaagtgatagcagcggagggagagaaatcgaaacgagggattccgaggtttttggtccaaccaaggaagaaatcagatacgatggctactggaggagaagg

SEQ ID NO: 191757 - DNA, 548 bp, Arabidopsis thaliana landsberg
aaattgttagctacaactaatcctccacctccaccaccaccacctttgcattctaattctcgaatgggagcccccacaagttctttggtgttgaaatctcctcctgttcctcctccacctgcccctgcaccattgtctcgttctcataatggaaatattcctccagtccctggaccaccattgggtttaaaggggcgtgggattttacagaatcttaaaggtcagggtcaaacgagaaaggccaacttgaaaccgtatcattggttaaagcttactagggcagtgcaaggaagtttatgggctgaagcgcagaaatctgatgaagctgcaacgtatgattaatatctccaatactaattttatacagttttgtgattttctttattatgctaattgcagcattgtgtcttttgaattccagtgctccagattttgacatctctgagcttgagaaactcttctcagcagtgaatcttagctctgacagtgaaaacaatggtgggaaatcaggtcgacgtgcccgacctaaagttgagaaagtgcagctg

SEQ ID NO: 191758 - DNA, 268 bp, Arabidopsis thaliana landsberg
atgtctaaatccgtcctcgacgaacttaaacgtaagatttgttcagatttgattattggtgttacttgtttttttttgtagtctcgtgtctttgttctctagatcttaggcttgtgtttatttcaataatttagttgttttctttcttgtttcagtgagaaagcgagaaaccgactcatcaaccttgtttaatgcaatctcgcttaaagctggaataagaaagtttgagatcgccgtggacgagaccgtcatcgtccgagcctcatag

SEQ ID NO: 191759 - DNA, 111 bp, Arabidopsis thaliana landsberg
gtcggcgagctgtccaccgtatggccgccacgcagggtgagcttgtcgttgacgtagtagtccgcgccgatcgacgcatacaccgtgttgcgccagttgaacgtttcgctg

SEQ ID NO: 191760 - DNA, 217 bp, Arabidopsis thaliana landsberg
atgaccgttagatccgcacggtggtccgatcccgttcttgtcctaagccagccatggtgttgctgtcagtccccaagtaagtcctaacgcctcgtgagcgtctgtatcgatcggaatacgcgacaccgttgctctcactgccattgtttcagatcagatcccttccaaatgtgaaaattttgattctggttttcggagatttggtgaaattggatga

SEQ ID NO: 191761 - DNA, 555 bp, Arabidopsis thaliana landsberg
gcaacggaagaaaagaaggaggagtctacgccgagtagaacacccatcgacgcctccaagctcgacaatgaggaaatggcgctcgtcatcaagagcttccgccaaatcctcaagcaaaggagggggaaagattacaagcctcgctccaagaaggtttgctacaagtgtggtaagcccagtcactttatagcaaaatgtcctatttctagtgacaggggcgacgacaagaaggggagaagaaaggagaagaagagatactacaagaagaagggcggcgatgcccatgtgtgtcgggagtgggactccgacgagagctcctccgactcctcctctgacgaggacgccgccaacatcgccgtcaccaagggactcttcttccccaacgtcggccacaagtgcctcatggcaaaggacggcaaaaagaagaaggtaaaatcaaaatcctccactaaatatgaaacctctagtgatgaggataactcttgtgatgaggaggataatttgcgcaccctttttgccaacctaaacatgccaacaaaaggaaaaattaaatga

SEQ ID NO: 191762 - DNA, 253 bp, Arabidopsis thaliana landsberg
atgggtcttcaacaccgcagattacacatccccaccaaagggaggtagtgatctagtgaggcgggttttcgacaaggaaatcgataatcaccatgaagaaaagcttctgatcttgcagttttgctgttaccatctacagaaactaccaaacagagacttttccctggcacaactactcgactggaggagtaaattccacaatcagctacttgctttcgcgaaagatcatgtcagcaaacaaagagaaagctgg

SEQ ID NO: 191763 - DNA, 146 bp, Arabidopsis thaliana landsberg
gccggtggtgcgtaaccaatggctacgagcgcatcatggatgtgcagccggacaagttgcatcagcgaatcgctgcttcctcggttaaaaaacgaggtggagcgggcgacgaagtatcacgtcgacgctggtcctcagagctaaag

SEQ ID NO: 191764 - DNA, 288 bp, Arabidopsis thaliana landsberg
ggtattgaaggtagtggcttctttgctttcgcctactgcatttgctcttgggtcaatcaactttgctgattatgagcgtgcacatgttggacttcgttggagcaatatatggcgggtatggtagttatgtaagtggctacaggccaaggttgattctccttgtattcttaacttttgttctggtcaatcttcatgcaggcatcttctggagtaagcttttttgtctgcctcttaatgatgttgctcgactctattctttactgcgcacttggactttatctggacaag

SEQ ID NO: 191765 - DNA, 220 bp, Arabidopsis thaliana landsberg
ccggcgccgcgtgaagtacccgagcagtacaagcagatccagaccgatacgccgcgtgtggtgtatcgtcggcatgggccgcatgggccagatcgtcgcgcggatcctgcgggcgcagaaaattccgttcatcgccctggaaacctcggtcgacaacatcgagatgacgcgcatgttcgagcaggtgccggtgttctacggcgacccgttgcgcccggag

SEQ ID NO: 191766 - DNA, 599 bp, Arabidopsis thaliana landsberg
atggcgcctccaaccgcagcaccagagccaaacactgtgccagagacttcaccgaccggccaccgtatgttttcccggatccgcctcgctacgccgaccgatgtccctttcattcacaagctaatccaccagatggcggtttttgagcgcctcacgcatctctttgtcgccaccgagtctggtcttgcctccacgctcttcaactcccgtccgttccaagccgtcaccgtcttcctcttggaaatctccccttccccatttcccaccactcatgacgcttcgtcccctgatttcaccccctttcttgagacgcataaggttgatctccctatcgaggatcgggacagagaaaagttcttgccggataagctcaacgacgtggtggtggctggattcgttctgttcttcccgaactacccaagttttctagcgaaacagggtttctacatcgaggatatcttcatgagagaaccttacagacgaaaaggcttcggaaaactgctactgaccgctgtggcaaagcaagcagtgaagttgggtgtcggaagagtggagtggattgtgatcgattggaatgtgaatgctatcaacttctatga

SEQ ID NO: 191767 - DNA, 133 bp, Arabidopsis thaliana landsberg
atacataaccctctatgcaccagatgcgataagctttgatcacaacatggtactcaataatgattctcttattcgctccttgtcgctaagcccatgggctcaactcaacgcatcttcaacatcctcaatataa

SEQ ID NO: 191768 - DNA, 100 bp, Arabidopsis thaliana landsberg
atgccacgtcgttgtaacatcaccatccgagttagcaacggtttagtaattttcgtaaaaatcaacttcgaattaggcacctttattgaagttcatacag

SEQ ID NO: 191769 - DNA, 181 bp, Arabidopsis thaliana landsberg
agacgcagatattggcattagaatctggaaaattacggacaacaacaacatcaactttaaatttaataacaacaacaaagaatcagcggcgcatcaaaaagccgagcgagaattcttcagaaacgtggcacaatcacgaggacgcgcggctcaggaaccgcgttttaatgataacgcgtga

SEQ ID NO: 191770 - DNA, 505 bp, Arabidopsis thaliana landsberg
atgcatccaacgtgttctggtaacgagctgacaattcaccatcgtcttcttcattttgtttcccggcaaacaaacagaaaacgtaaaagaatgaacacacaaagtcagaaaaagacataaatcagttatagagaaacagaaaatttaccagttgccatagaagaagaacaaatccaaaaatttcccaagtttcaattttgatgtcagcttctctaatcgtagagaaatgggtttagagattggaaatgaaaggtcctaactttcagtttaatcttcaaactatctaaacgaaaaaggtgttcactttatctacacacatataattgcagaattcggatttgtaccgaacaaaaccgttatccattcaccaatggtttcttctccactacaatttgaacctaatgtggaccccaaattgaaaattgaaaatgtgtgtagtattaaggagaattttcttatcacttactcagaaagattcaaagagacatcaacagattacttttaa

SEQ ID NO: 191771 - DNA, 136 bp, Arabidopsis thaliana landsberg
atgagcgaaatagcaagcaagtacgaccaccacttcccggagcacttcgtcattagcatgttggaacagagcagcaccagcagcagttactgtgacgggaaacctgaccagcaattgccatttcagcgaccaattc

SEQ ID NO: 191772 - DNA, 123 bp, Arabidopsis thaliana landsberg
atggccgcgggtcagccctcatccctgctaggctttccggtcgtgctggctgaagatatgaccgcacgcgccgccaactcgctgtcgatcgcgttcggcaacaacctcaaaggctatacgatc

SEQ ID NO: 191773 - DNA, 177 bp, Arabidopsis thaliana landsberg
ccctaccggtaccaggctgccaacaaagatgagttggagcgtcagtgtgcagccatgatggaacaagggatcgtccgacgcagcgactccccgttttcgtcgccagtcctccttgtcaagaaggctgatggatcctggcgcttctgcgtcgactatcgggccctgaacgccatgacg

SEQ ID NO: 191774 - DNA, 874 bp, Arabidopsis thaliana landsberg
atggctgcgactctgctgtctcaatgctaccgtatctacaattccgatgcgtgcaagtgtgtttcttctgagaatcaccagacgacggggaagcgaaatgggaatcgaaatctcgaattcgactcggaaatttggaatccagcacggctagtacttcgagtccgattcaaggtaactaagcaggtcaatgatcctgcgctgactagggctttacgtggtttcgctgattcccgtcttatggaggatgcactccaactgttcgatgaaatgaacaaagctgatgcttttctgtggaatgtgatgattaaaggtttcactagctgtgggttgtacattgaagcagttcaattttatagcagaatggtgtttgcaggggtcaaagctgatacctttacttatcctttcgtgattaaatcggttgcgggaatttcctcattggaagaagggaagaagattcatgcgatggtgattaagcttgggtttgtttcagatgtttacgtctgtaattctcttatatctttatacatgaagcttgggtgtgcttgggatgcagagaaagtgttcgaagaaatgcctgagagagacattgtttcgtggaattccatgatttctggatatcttgcgcttggagatggctttagctcgttgatgctgtttaaagaaatgctgaaatgtgggtttaaaccggacaggttcagtaccatgagtgctcttggtgcttgttctcatgtgtatagtccaaaaatgggaaaagagatacattgccacgctgttcgaagtaggattgaaactggtgatgttatggtaatgacatcaattcttgacatgtacagtaaatatggtgaagtgagttatgcggagaggatatttaacg

SEQ ID NO: 191775 - DNA, 362 bp, Arabidopsis thaliana landsberg
gactggagcacgatatcacagacaacgtttctcctggtttttcatatgaagtctctgctagtgctagagtatcacgacccgatatagggaccgcgcaggtcttggacactgtgaagttagagcacaaaagctcagctacgcactttcgactaattggaaagtaatggaaccacataacttctttgtgatatatagtcaaaaagacccagaaatgttgacattgataatgtttttatctgcagaacttatgcttcgaaagatatttgtaaaactctggaaggaacttttgaagtgtcaggaagacctgaccgtgttgtattcttcttggaagggccacctcctggaattgcccttcttgtaaa

SEQ ID NO: 191776 - DNA, 140 bp, Arabidopsis thaliana landsberg
atgaatcggtgtgagaaaaagcgaacaaaaacccctagaaatgactgggaaacgagaagatcgagattacattttcaaacagatgaaactctagtgcttctgcggcgaaatagtgaaactccggcgacgaaacttttccg

SEQ ID NO: 191777 - DNA, 173 bp, Arabidopsis thaliana landsberg
ccgctttccgtcttccaaaagcatgcatcaaggaaatagataaactctgttcagcgtttctatggtcgggtccatctctaaacccaaagaaggctaaagttgcttggtcggaggtctgcactccaaaacaggaaggaggattgggtttgcgatcaatagacgaagcaaacaag

SEQ ID NO: 191778 - DNA, 943 bp, Arabidopsis thaliana landsberg
gttccaaggaagatgacgagcctgactctggttgggatttctctgggctcgataaccctagtgccatgcgggacttcatgaccgcatgtgactactgcctctctgattgctccgatagtagccacagcctcggcgacgaggactgtggccaaagtcgcgaatgtttccacgtcgatctagggggtcacgacgaaggcaaccacctcagtatgccggaggatgacgatccccctaggcctgcgcctcgcgttgacatcatgcgggactagatgtggtcccagtccctgcggggggtcaggacacacagctcgagcaaatctgcgagatgcaggccaagctcgacgaggaagcagggcaacttgtgtagctccggcaaaacatcgagcaggagtgggcaggccgagcactcgccggagaagcgtgtcatcaggcccgggacgtcccgcgccgtatcgttgatgatgccagggcaaggctgcccccggcctccagcggggtcagccagaatctggctgcagcggcaatactacaacgagcgatgccgaagccatctaccaccgaggggcggcgtatccagggagaactcaagattcttcctggaggatgccgcggtccgacgggccaaaagctctgcctcccgaaggcaaaggtgccccccggagcatcgcgcaatgacttcccgactcatgcgggaggcctcggtccacaccgggcgcacgcaggacgtgacgcctgcagccccggatcgcctcggccacgagcaccaccgccgcgaccgtcgagcccaccttgacgagaaggtgcgccgaggctaccaccccaggcgtgggggacgctgtgacagtgaggaggatcggagcccctcgcccgaaccaccaggtctgcaagccttcagccggacgccgttcccagctcggttctgggccccgactaccatcaccaa

SEQ ID NO: 191779 - DNA, 558 bp, Arabidopsis thaliana landsberg
agccggtccggtccgccaagggccacgtgcgaccaatcgaagcccatattcgcctcgcaatgtccattggtctaacggtctggcccgcaatcctgttctgttctagttgtctctgaaacacactgtgttgttctcgtctctgaaacacagtgttgttctcgtctctgaaaccttcgcttatggagaacttctgttctattgcatgcctttgaagacaagagactttgaccgtaataaatggttattccacaagttttgtaattctgtgttatcaccaaacacaaactgttcagtctactccatcgttaatatctaggttcaccattgaatcttccaccagctataaccaaacaacgacgaaaaagagatgtcataactatttaactacacaaatagcaacaaaaaaaatcaaaaactagtcattacttagtacctatgaaattgtttccaaatgtctccaattagaaccttggatccttcaacgatggtgatactaccaacaccaccaaggacgagattcttcaaggcattggaaccaataggaccacaattgagtaa

SEQ ID NO: 191780 - DNA, 171 bp, Arabidopsis thaliana landsberg
atccatgtttacattgcatatcgtgcaacgagcatacaaagacgtcgtcgaaagatcaattttacaaaaatgacaatcgtgatttccattgatgaagatcttgggaaagtgactgcacggaagtggctggtggaagagctcgaagatctctacgcattctatatgcaatga

SEQ ID NO: 191781 - DNA, 148 bp, Arabidopsis thaliana landsberg
ggttagcttgaaactccttcatgtattcctctgttccgttaatcgaacagttcaaaaacacagatcccgtggactgcgacgcatcaatcctcccgtgtgctgtgatcgcgttgttggcaccgccttgctcgagtttggagtgttttga

SEQ ID NO: 191782 - DNA, 70 bp, Arabidopsis thaliana landsberg
atggccgttacttcgcttctcgataccgttttccgacgtacaaagaagaagtctactgagcttataagct

SEQ ID NO: 191783 - DNA, 344 bp, Arabidopsis thaliana landsberg
atgctactacgagtcgcgccgcacgcggcccctgacaccggcacgtttcgcatgctcaccgccgcgctctggcgcgccggccagccctccgccgccgtggacctcctccgctgcatgccgccgctccttcttgactcggacccgtgccactggcgcgcggtcctaccctccctctggcctctgctgccgaggcgcgccggcctgggacgcgctcacgttcctcgacgacatgcgccgggcacgtgcaaaggggaagcgcgaggagaagtgggcgggcaggcggccaaaatgcgttggctttgctgcgggccgtcggattgaggagggcggacacatcgtggcag

SEQ ID NO: 191784 - DNA, 395 bp, Arabidopsis thaliana landsberg
tgcaaaacggcaatcgagattgtggagtacccctggctcatggaggtaagccagtttagtcatgtcgtcaactcctgcaggcggagcctctgtatcctttggatagatactagaaatactagcaacaacctgtaataatataatctattctcaaaattcttctagaaaaatctgtgaatcttactgcaaaggtccatggtaaaaatatcataatcttttccatttattgtggttttatatgtaatgaatattagtttcttactgttttcccgtttgcagtgactattttggcattggtgcctttgatttcagtcacttctccactgatccatgcgagttctggatcctcgacccagacatgtgatccgagtgtgatatttacaggagtcccctaa

SEQ ID NO: 191785 - DNA, 91 bp, Arabidopsis thaliana landsberg
atggtggcggcggtggtggcagcggtggtggcggtgtgctggcgggcgggggcggtggtggcggtggtggtgacgatgggggcggcgcatg

SEQ ID NO: 191786 - DNA, 148 bp, Arabidopsis thaliana landsberg
  unsure (1)..(148): unsure at all n locations
ggnnacctgaccgaaaaagaagggaaggcgaacgctgaagcccagcaaaaggaaaacaagcaaacgaagaagcgccggcagaaccatgtcgccgacttcatcgacaacgccacgttctacggcgacatccgcgcacgctatgaatatc

SEQ ID NO: 191787 - DNA, 102 bp, Arabidopsis thaliana landsberg
gggttgggagcaatcctctacgcgtatagaggactaactgaagatggacttggcttgggcttgacctgctggtggacagaagaacatgaacagattgtatag

SEQ ID NO: 191788 - DNA, 555 bp, Arabidopsis thaliana landsberg
gaactgtttgcgaaattgacgaggatagccatgattgtgagcgatatgtttgtggggagagagagattcgcgacgatattgctgatgagactgacggagacagtgattctttggatatctgatgatcagagtttctgggaagagatggagacaggagataaaccattaggtccacttggtcttcaacagttttacctggacatggagttcgtgatgatctttgcctcgcaaggaaggtacttgtcgagaaaccttcatcaagtgatcaagaacataatagctcgagccgtcgaagcagtttcagccactggactcgacccttataggtacgtatttattatccgttacaaacataaacatacgtatgtatgatggtttgatgatgatgatgatgatggatgatgaaacagtacgttgccggaggaagagtggtttgcggaagtagctcagatagcgataaagatgttgatgggaaaaggcaacttcggtggccacggagagcgtgacgttactagcccctctgtttcctctgctaaatcttacaccagtaattga

SEQ ID NO: 191789 - DNA, 1809 bp, Arabidopsis thaliana landsberg
aaaaattagacgagaaaataggataagtgagtacaaaaatattccctgataatttgtttttttttttttctcagaaatcagaaagaaaaaaaatgatagaaaattattggacttccttctgcgggaatcaccacacatcatcaaactgcactgttcgatttctacagatatgtttcggtatcacactctcattcctaaccctctgtatttgcttgtttcacaaggaacctcccaaaaggattcatcaattcttttgtctgcgactagtgtctgctctattcaacggaatcatcggatctctagatttggttttagggatttgggttttacgagagaatcacagtaagcccttaatcctctggctggtcattctgattcaagggtttacatggttattcattaacttaatcatttgcgttagaggaacaagaatccgcaagtcttcgttgagattgttatctatcttctccttcttttatggtttggtctcaagttgtttatctgtgaacaatgctgtgtttggagatgaattagcagttaggacaattcttgatgttttgttacttcctgggtcagttttgttactcttaagtgcttataaaggctatagatttgatgaatctggtgagagtagtttatacgagcctcttaatgctggtgattcaaatgggtttagcgaaaaagccgattttgataaccgggttagccagtttgctaaagcaggattgttcagtacgttatcattctggtggttgaattctttgataaagagaggaaatgtgaaagacttggaggaagacgatatacccgagcttcgaaaggaagagcgtgcagagacgtgttattccttgtttgaggaaaatctcattgagcagaagagaagattagggagttcttgtcaaccttcgatcttgaaagttactgttctttgtgtctggagagagcttttgacctctggtttctttgcttttatgaagattgttgctgtttcagctggtcctttgcttctgaatgctttcattttggttgctgaaggcaatgcaagctttagatatgaagggcttgtgttggctgtgttgctgttcttctcaaagatgatagagtctttgtcacagagacaatggtatttcagatgtagaattgtcggtttacgcgtgaggtctcttctaactgcagctataaacaagaagcagctgagattgaataactcttcaagactgattcattctggcagcgagattatgaactacgctactgttgatgcttacagaattggggagtttccgtattggtttcaccagctttggacaacaagctttcagctactaatcgcgcttgggattctctttcattctgtgggagttgctacgttttcagctctagctgtgataatacttactgttttatgcaacgctcctatcgcaaaacttcagaacaagtttcaaagcgaactcatgacctctcaggacgagaggctgaaggcctgcaatgagtctcttgtcaacatgaaggtcttgaagctctatgcgtgggaatcacatttcaagaaggttattgaaaagcttaggaacattgagttgaaatctttgaaggcggttcagatgagaaaggcttataatgcggttctgttctggtcatcaccggtgtttgtctctgctgcaacttttgccacttgttatttcctagacattccattgagagcaagtaacgttttcacttttgtggcaaccctgcgtctggtccaagatccagtccgaatgatccctgatgttattggagtaacaaatcaggctaaagttgccttcagtc

SEQ ID NO: 191790 - DNA, 222 bp, Arabidopsis thaliana landsberg
cttccaccctttttgtgtccaatccgcccgtgactgatagcaatttgggtcttagagtgcgaccctccgctgaagaagtccgtactttggttgattcgctcggggagatacctgatgatgaacggcagatttattttgaagtgcccctgaaccctagtgatgcagacataaatgacatgcttgatctgctagctgaggattcatctgatgctgctcctgatg

SEQ ID NO: 191791 - DNA, 111 bp, Arabidopsis thaliana landsberg
atgtccaagaatttgaaatatcacgcgttcatacgagttagatcttcggataatgtattgcaaatgaaatctgcccttgatactttggtatcactaagtgataaatacttc

SEQ ID NO: 191792 - DNA, 435 bp, Arabidopsis thaliana landsberg
gcgttgccgtaattgtggtgccgggcggcggccatagtgagttgtggatcagccatgaagggtataacccggctaaatggttaaaggaacatggcattgccgcttttgtgttaaaatatcgtttggccaaggagccaaattctacttatacggttgataaagatgaactggccgatatgcaacgcgccattcgcctggtgcgaagccgggctaaagaatggagtattgatacggcaaaggttggcgtaatgggtttttcagcaggcggtgagctggccgcattggccggtatgcgatttacagctcctgatataaatgctgccgaccctattgaccgtgagagcgatcgtccaaattttcaggcattgatatatccgggtaatatcagccggctggaagtaacaaaaaggtcgcccccggcatttctggcagcgg

SEQ ID NO: 191793 - DNA, 152 bp, Arabidopsis thaliana landsberg
gtggactgcaaatgattgacctagataagtcgtccattaccttcgggaacagcgtttaccaacacaaaaggaataatatcatgagcacactaaatatccccaatactggcggtggaagaaagtatttagaactcccggaacaatttggttga

SEQ ID NO: 191794 - DNA, 585 bp, Arabidopsis thaliana landsberg
atgtgggaaaacaaagaaaaaacgttttgcacgtctttagctcaagtgagtgagtgagttaaaagggttgaaaacttggtggcattacaacactttaagagcgtgaataagcttagcctttcagtaagtaccatcactactcgtcgcaactgtgacagtgacatcaaagaaactttaagaaaacttagacaatctaattttacaaacacaaaagattccaacctttttataccacccagataatcccaaaaaaatgtctgggtgtaacatttactagtaatagttcttcagccaaaaacaaaacccaagaaaaaaggctactaaaatactactaatatatatcagcctacgaccgtttaattaaaatccttgaggtaacgacggtgacgtagtgtgacccatagtagcaggtgaccagaaatcagcaccgttggaattttccacgtgtacggtggatgagacaggtactagacataatcctctgcttctcaagtctttcgctttcatcgccgccattacatctccggtgacaactccaccgtcctaataaacgtcgccgacatgtcagaagcaccatttcattaa

SEQ ID NO: 191795 - DNA, 1281 bp, Arabidopsis thaliana landsberg
atgggggatggaagaaattttccaaattctcaagaagttaaagtgatggaagtgagctaagtagcgttggacaaaaaacaccatcaaattatgtaaaactcaagtttaacgtcaaacactcaaacatgtgttttcagaaagaacttttacatatgtgatgcgtgtcccagttaattatatgattttgttgatagttgtatgtgtcccaattgaagaatatttagtttatatatcgatgcgttatgcaatgcaacaaaacgagagagagatatagttatacttttataattagatgtttttctagaaaacttacagaaaattatatttctacaagatatatatatatataatttaattttgtagaaaatgttattttaagataatttttgaactctcatttccttttgatattgtgagggcttttatatgatttttttttttgtaaatgtatatatatgaatgaaaattagtaataagattttggtaaccaaaaagaaaaaaattaactataagtaatttagagataatgttaatatggatgtcttatttagttttaaatctacaattctgaaaacaataattcatgcaaagtgctggtggttaaaacgtcacatatacatttaggaaagaaaaaagtattgcttacaaatttcattgtaaccacatacatacggtcacaagtgtcaaacaatttacctgaaatggtgatcataccttcttttttcttgttgttaaagacctacctaaagtgaacatgttttggctatataataccattttcaccttaattacatttgcaagcttatactttctttcttcttttttctggttcatttgcatagcttttgaagaagctacaatggcggacggagttagaaacgatattttcaatgtgttagctaggtttgataataatcttataaaaaaccttaggagtcacctaggcgaggtaagctccaaatgctgcgtgtctttctcactttcttctttggtatattactttttgttttttttaatattttcgtatatctagaagaattgaagaaatcaaattaaaattgatacttaaatatctaacttgattctttttactcaaatgagatggtcgacttggatcagctgcaacaaatccgagatctgctagaaaatttcataaaccatctggaggcaaacgagttgctgccacaaccgaatccaatgtatcatgatcctctggaagatctaggggattcaccagcaagctccgacgtgacggaaggatccaacagcgacgaggattga

SEQ ID NO: 191796 - DNA, 227 bp, Arabidopsis thaliana landsberg
gtattctatgcaatgggacaacaatgaagataaggagacattttggagcaaaagctaaggaaaaggaagctaaggacgattttggttcaggaatcagcgaggagtgtcgatcgacacactcttggtgtcgatcgcacaccagtttcggccctgcaaaagtctatgacgcttacaagtttatagaagtggaaatatgccccagaagactttcctatttgcattattag

SEQ ID NO: 191797 - DNA, 139 bp, Arabidopsis thaliana landsberg
agaaagcgacatcgtcacgtcaattatctgtgtctcacggatcttaacatacaccttcatgtacctaatcctaaccccttgcgtaacttatgtctttttggcccgtggaatgaattatatggacccaacaatactatag

SEQ ID NO: 191798 - DNA, 371 bp, Arabidopsis thaliana landsberg
atggttagaggaatctgtgaagagagagtgatgcgtgtgattgtgaatagagaaggtttagtgaagtcgagagaaacagtgtaagcgttcatcaacacgcagtggccggtctttacttgggtttgtcgaggacgattaaacccgtcgggtctttgtcatacacaaaacataaagttatttaattatttcattgcttaaactttttttttggaagttggtaatttatattttgttttaagctctcaagaagattctttgatcactgtataatagaatgaaaatatgttattgtatgtgttcataatttatgttttttcgttataaatatgtttttttctttttgcaggaaagaaaattttcataatttataa

SEQ ID NO: 191799 - DNA, 294 bp, Arabidopsis thaliana landsberg
atgaagccaaccgcagatgatttcctgtcgcaatacgatgagccggttcttgaacaggccctgctgctgaagaaggtaatcctggaaaacctgccggggattaccggacaggtagacctatcagccaaaatggtccattatgtatacggaccaaaatatgtcgacctggtttgtgcgatcattccttctaaaaaaggattgaaattaggttttaacagaggtgctgaattacccgatcccgatggtttgcttgaaggaacaggaaaaatttcgcgttacgtggtcatcgcctaa

SEQ ID NO: 191800 - DNA, 37 bp, Arabidopsis thaliana landsberg
atgacaggcttcgcttggctggttgcacgacttggcg

SEQ ID NO: 191801 - DNA, 194 bp, Arabidopsis thaliana landsberg
atgattgcttcaatgctggtaaaaccctaaactttattattgaagtaatgaagccaaagttttaataatccgattttaaaatgtctaagattcctgctcactctataaatgacaacaacattatcaaattttaaaaatagatatttaaaatgaatcaaaacgacaaagacagcaacgacaatcctttggattaa

SEQ ID NO: 191802 - DNA, 109 bp, Arabidopsis thaliana landsberg
gatgtgccacgtggaatacggctttgcatccttcgatcgccggtttgaagctctccggttcgttgagatcggcggtgaatatttgaagcctctccgatgcaaatggtag

SEQ ID NO: 191803 - DNA, 75 bp, Arabidopsis thaliana landsberg
gagcagatggaagcgttcggcacgcattttctgatgaccgagcgccgcgccgacgaggcgacgcgcgaggtcacg

SEQ ID NO: 191804 - DNA, 908 bp, Arabidopsis thaliana landsberg
atgggccagagtgagttagcctatctgaatagggttttctcagcttcaatgaaaaaaaccgacaaactcaacgcgttaccggtaatattttcacaaagcattaagcctctttatttggagaaaaaattgaccaccgatggttgaaaaaagcttctagctttctttgtgcagtctcattctcgaggtaccactctgttttttttccttttttgtttgatttgctgatgttgtcattttcatttcactattcaagtattaatcatcgtacgattacatgttcatattaagttgattataacttgcaatagtatcatcttactattattcgcagtttcttgtctatgcatgcacaagggtccacgttcgtggttaatttcctgcaaccaccatgtgatgaaaagaccttacatttatattgcgcatttcgcttcactgtaaccagctttcgtttattgacttgtagaaaacgagttttgaatattgagaatttcggaagctatacaaactaaatgtgtttatgaacagagaaaaaaacagagttataagaaagaagacagttgagggaaagtttattagcttccacgtggttgaagaacataaattcgagctgttgctattataaatagacatggtttttgggagatgaaatgtcttgatcaagagaaatggtcattgagtggaaaaaaaaaaagagtcgtacgaaaaacaggacaagtcaagagttttaatagattctctttcacgtggttgaagaaattaaagattctataaaagaaggagacatgagttttgggatatgagatgtctggggcaatacaaaactctgagaacgactctgttctttttaacagttgtgtaagaaaacggaaagttttgtaagagacaagacagctcaagggaaagaagag

SEQ ID NO: 191805 - DNA, 149 bp, Arabidopsis thaliana landsberg
atggttaccacttgttgtactccggtgagatagacggccaaagaacatgaatcgtctaggccggagcaaaccgcggctacggtgacgtcagtcatcactggccttatcaagtattcggcgagccccgacaagaaaaccgtcaccagtag

SEQ ID NO: 191806 - DNA, 120 bp, Arabidopsis thaliana landsberg
gactatccagatgtttttcccgaggaaaattcagaaggtttaccacccattagaggcattgagcaccaaattgactttgttccaggagcttataagaccaatcccgtggagaccaagtaa

SEQ ID NO: 191807 - DNA, 368 bp, Arabidopsis thaliana landsberg
atggtgaaagccgtggcaccaaaggaaccggaggctgtgaaacctgaagctagcaatgtagtggctatagtcgctggcacgagaacgggactgaaaatgacaaaaagtggtgtgcttatgatacatgcgaccactgagccgccgagggttataccggcgaatgtcaaaagagctagtgcaaccccggcggagaagaccgcctgaataatctcaaacatctttgggatgatcaagctaaacggctgggatttggtctgatcgaatggtttatgatttagtggtgggaagaagtggggttttatcaagaactagtggaagtctacgtgaacgctacgctacacattcatgctccatgcaaaacgatctga

SEQ ID NO: 191808 - DNA, 384 bp, Arabidopsis thaliana landsberg
atgctcggttatgtggaaggcagctttggcccggtggtggcggcgcgtgccgcggattcccgcgccggggcgccgaatacggagtacacgccgctggtcgcgggttcgctgaactttctgcgggcgcagacggtaagtggaaccgtgagttacgtgcagacccgccccaacggcactaaggctgaagagatgaccgtcagaatttccagcgcacctctgcactggaagattgacacctacctggcctggtcaggatgcaatatcgtagcgaccgtgccttgtgaaggtgaagtgtacggccatgacggtcaattggtgggcaccatcacagagctgaccgtgggggccatgctgccgttcggtgccaaggggaataatccggat

SEQ ID NO: 191809 - DNA, 691 bp, Arabidopsis thaliana landsberg
gaggaatgattcttccattttcgacacagttcacttgccctgttcaggataatggattcagcccttcttcactactttcccattgcaaaagagatcgttttgaagttacttcgttgagatatgactcttttggttcggtgaagattgcctcctcctcggttagtttctgattacctaactctctaattttgattacttaagttgcgaattggctaatttgaaaccttttttgctctgaggtattgctagaagtggaatgttatgaggtcgaggagaaatgtgaaagcttttgggttagttgataaacttgggaagaaggtatggagaaagaaagaagaagatagtgacagtgaagatgaggaagatgaagtgaaagaagagacctttggcgggaaagaagcgagtctcgatgatccagtagagagacgggaatggaggaagacgataagagaggtgattgataagcatcctgatattgaagaagacgaagagattgatatggttgagaagaggaggaagatgcagaagcttcttgctgattacccacttgttgtgaatgaagaggatcctaattggcctgaagatgctgatggttgggggtttagtttcaatcagttttttaataagataacgattaagaatgaaaagaaggaagaagaggatgatgatgaagataatgaaggagatgata

SEQ ID NO: 191810 - DNA, 571 bp, Arabidopsis thaliana landsberg
gttaaaggatcatgaaattaatgaggaagtgcttgatgagatagcaggatatgcgtatcttatcacagaagatggaggaaatccagaacccactgatttccaagaagtcctgcaagaccctgacagtaagaaatggcttaaagcagcagatgaggagatagaatccctcattaaaaacaagacttggactctagttgacagagacaattctcagaagcctatcgggtgtaaatggatattcaaaagaaaagctggaattgctggagtagaacaaccaaggtttaaggcaagacttgtagctaaaggttatgcgcagaaagaaggaattgacttccaagagattttttcaccagtagtgaaacatgtgtccattcgactcttgttgtcaatggtagttcatctaaacatggaactgcagcaaatggatgtaaagacggctttcttacatggctacttagacgaaaccatttacatggaccagcccgaaggttacattcatgaaaaatatccagatacagtttgtctgctaaacaggtcattgtatgggttgaagcagtctcccagccaatga

SEQ ID NO: 191811 - DNA, 2022 bp, Arabidopsis thaliana landsberg
  unsure (1)..(2022): unsure at all n locations
atggagaagcaaaaggagaagcaagagaaagattcctacaatgaacgttccggtttgtaagattggtaatacaaaatcttctaatagtgagacaaggtacgagccgcataggaaccatccgaagagtaccacaagcacaagtggaactattggcgatggccctttgctctccatatattttgctcaagttggtgttgagtgaagatgagcttagaatgtgcagttgtgatcaagtttttaaatacatgatttgttttggatgcatgcggttagataacctaattaacgcaaatttcctttgtatacctttatatatattttgttcttataatatatgatcaactttaattaacactttttaatagatgatatcatcttttatttaaagaaagtaaatctttatagtttttcgacgaatggttataccaatctaagaacattttcgtttgttaaattgttcaactgcctctacgtttgatacgagatgataaacaactttcgtcgtatcaagattagaaatatactttaactagatgaacacccatgctacgcatgggtttttgtttttaaaattgtcggaaaatatgattatggttttttgttgattttgatgttcattttgatattcattttgataaattcatctatttaatataattattattttttatgattagattcatctataactcaaaatatcaattctactacaatatgtatatttatatatttattattctaatatttcactatcatgatcacatactacaaaaatatatgatatattgatacaatgtatgtagttatattacttatgtgtgttgaaacttgcctaacttaattgtaacaaacgattctttattccaaatattctctcgtcatctagtacacaatcacatcatgatatgctggtaatttaagtcaacagtgtaattctcatctctaccatatagttatatagagtctcatgttgttgttgttttggtatgtctaatgtcttggatgactcttacgtgaatgtacagaaagaaggtcatatgataaatcatattcatataacgtaataataaaaaaatatccaactaaaattactaaattaatatgaggttagatagcaaacatttaaactgcaacacaagtaaaattttagccattatgggttaatgactattgataaaaaaattaataaaataagtagaaaagaatgaaagtagtgcttggtacattattatgattttttattcattgattatttttagaaaattcatttaagagtgagattagtggagaatttaacacaacaaaagacttttgattttttctcaattatttttgctagttttttaatttaactaatgtagaatgacacatgtcattttttgtgtgatgatgtgtcactcatatggagagagttggccaactttcatatatatgattcaatttcctattcaatttctttaagttctatatttaaagtttcaattactattttgttattcatcctatttcaataaaagaataattcatgttttgattatgctttattatctttgatatcagaagacttnctccccattggtatctctggcttttgtctacatatatagaatagacgttaatataaattataaatgaataatttaaatttgtcacactagtaaaaaaaatttgtatagctacgagttcgccacgtcgattcgtgacaaatattagactaaccacgacgtagcaacgaaatagccacaaaatatattttaatgttttacgtggctagtttatggctaaatcgtgactataaagccacgaatttgtcatgttactaattcgtggtaaatatagccacacaatagcgacgaatatattcgtagccgaatggtgacgagacaatgtgtggataattcgtcgctatacaatagctacgaacaagcaatgcggttttttcgtcgcatatccaccgaattaaacatcacatcatataacaccaccgaattatacaatagcgtggttatttcgtcggaataa

SEQ ID NO: 191812 - DNA, 59 bp, Arabidopsis thaliana landsberg
atggaaaaagcttacgtccgcattatgggtgcagcgtcgtcaattcttagcaaagatgg

SEQ ID NO: 191813 - DNA, 69 bp, Arabidopsis thaliana landsberg
atggctgcgctatgtcccggaaaagacgagtgttctctcgccatttacctctccggctttcaacaagtt

SEQ ID NO: 191814 - DNA, 149 bp, Arabidopsis thaliana landsberg
agataaaaaaaaacaattccatgttacgatttatgaaaatgtaaaagataagacgatttcttatggatcgactacagttaccaatatgattccatctgacgaagaaatcttcgatatagatatttcaaaaacagagacatcttatatag

SEQ ID NO: 191815 - DNA, 421 bp, Arabidopsis thaliana landsberg
gagagtggatctgtgaatgaaccgaaagattggactgctgaagatatcgagattttgaagaagcagttgattaagcatccagctggtaagcctgggagatgggaaacggtggcttctgcgttcggaggaaggtacaagacagagaatgtgattaagaaggcgaaagagattggtgagaagaaaatctatgagagtgatgattacgctcagtttctgaagaataggaaagcttcggatcctagattggttgatgaaaacgctgaaaattctggagctggtggagatgaggaaggtactaaggagatttggagtaatggagaagacattgcattactcaatgctttaaaagcttttccaaaggaggcagctatgagatggaagaagattgcagctgcagtacctgggaagtcgaaagcagctt

SEQ ID NO: 191816 - DNA, 1918 bp, Arabidopsis thaliana landsberg
atggcggtggatattcagacttatattcgcagttgtagtgtttgtcaacaatgcaagtatgatacaacaacgtctccgggtcttttacaaccacttcctattccagaaaccatttggactgacatttctatggacttcattgatggtcttcccctttcttttggcaaatatgttattttcgtggtggtggatcgtctaataaaggcagctcactttatggcgttagcacatccttatacagcaatgtatgttgctcaagtcttcatggataacgtctttaaattatatggctgtccaaagtccattgtgagtgacagagatactgtgtttctcagtaatttttggactgaattgtttgctttgcaaggcgtggagttaaaatttctctagtgcgtatcatcctcaaagtgatggacagactgaggttgtcaatcggtgcttggagacctacctaacttcagagaaggggtcaccacattcttcacaagaattgtcaaaagcttgcagttcgtcaatgtggtatactcgagatgttagagacaacgtacaacgggacaatgtcagcttgggatgaattagtagaggaaccataggcggatacataagggaagccatcatggtggtactagaacctatcacagagattcttcattccttttcaagcttgaggacaagcttgtctaaatggggggagtattgatacgttcatgggaagaagctggagtaatgagttggcacgtgagaacacacgtgagagattggagtcacgtgtgaagaaacttataaatagtaagagagagtagagagaaaagtatcctgcgtgatcattgatgtgtaaagaggattaaagctttgtgtgctctgttctttggagataagagtggagaactgtaactccaagcttatcaatttagggttttgattcattgtaatgggattttaaggataagaaagagagattcatagtttcattcttatcataagccttgctctgtttcttacaacaggcgacttccttctccgtcttgtttcagttggattctcaacttcatcaagtgatgcttctttgcatgcttgaacttcaccaagacattgttgaacaaagtttcagaattctccttccacaactccaaatcctcatccatttctcccttgcctttagagaagttttcctatcttcttcatccctttttggagccttcctcttgaaggtacgatatgtgaaactgtttgtaattgattgtactctctcctattcttttcttcctttttttgtttcttcttcttctactttttatttttctttttttctcttcggtttctcaccgttgatttgttgtctccttctttctcttcttctcacagcggaattcttcttatccattttttacttggacatgctccaagaccaagataagctttgataccatgttggaatattgagagaaaaagaaaaaattgagtaagagataaatatctcttctcttgtgaagaagacaagaacgaaaatagaaaacttttaatgaacctgaaacttattagttatttacatgacgatacaatgagtatatataggaaacaagtagactcaacaacagaatgagttgtgtctcttcatacttgtgtctcttcctacttgtgtctcttgacaaataactaccttaatacataaaattttaaatcagaaactcaattatcgaccaacactctgacccaccaatccagtacaaacctccgaaaaggagtagctattcgacaaccgacgtgtccgtcttccaatctcgttcctagcaaccagacgaactcagatttatcctctttttctccgatccgattaggaggaagcgaattgtgggagaaaccaaggttgatggctcaagcaagtactgagaatccaaaatccacaaaagctttctaa

SEQ ID NO: 191817 - DNA, 120 bp, Arabidopsis thaliana landsberg
atgaagaatcctatcgaacatctcaataaggcattcgacagccgcgtaaggctgggcatcatgagcgcattgctgatgaatgagcaggtgagctttaatgaactgaaagaactgatacag

SEQ ID NO: 191818 - DNA, 287 bp, Arabidopsis thaliana landsberg
gcttggaactggaaaaatttaacggattaagcgattccgcacgaagcttagcgccgcataagtcactagagatgcttcctccggtatacggcgaaagaaagccattcgaaagagaagctctgagagatgaagatgaagaaaatctcggtttagatctcagattacgtgtagaagacgggataatcgctgacgtacgagctcgaagcgttgtgaagctcgtcgcagtagctgaagctacctccatttcttctttgttgcagagagagagaaagagtgaaagtccctga

SEQ ID NO: 191819 - DNA, 83 bp, Arabidopsis thaliana landsberg
atgagaagacatggggaacaactttcaacagcgactaacctcatcaaggacatcgatcgaacatttcgatctcaaaactcatg

SEQ ID NO: 191820 - DNA, 211 bp, Arabidopsis thaliana landsberg
gggtttcctgcccgaagcattcgtgaacctgctggcattactgggctggaacgatggtaccgataatgaactcttctccctcgaagaactggttcagaaattttccatggaccgcgtacacaaagccggcgccaaattcgattttgaaaaagccaaatggttcaaccatgaatggatcaagagactacctgcaagtaccaacctgccgcag

SEQ ID NO: 191821 - DNA, 125 bp, Arabidopsis thaliana landsberg
aaggtcaacaagagaaaatacccagaaaagaatacaacgatgatgttgatgattctgattatgatgatgatgatgataacaacattcaaagttcttcggaccttcgttgttgtttgttgacttga

SEQ ID NO: 191822 - DNA, 46 bp, Arabidopsis thaliana landsberg
atgatggacgcattctccctctttgagaaggaaaaaacgctagcag

SEQ ID NO: 191823 - DNA, 68 bp, Arabidopsis thaliana landsberg
atgtttcactcgccgaacaacgatgacgggccactacgcagccataccagaatagaccaccgagacag

SEQ ID NO: 191824 - DNA, 543 bp, Arabidopsis thaliana landsberg
ttgccaaggttcaaaccaacaaccatatatagccctgggagttcggcataaaccgagtaacccgaaaccgaacgacaaaattaattttggcaatcggatgttggtttgggtcagttcggtaatcgaaccgatcgggttaattcggtttagcagcctattaagctgccctatataagtctaaccaaccctaatttcatttctctttctcttagcctccgcctcatgcaatttatagagaataatctttcatctcatctctgatctagtcatctagacatcatctcatctcttctccttcatcatttcatcgtgatcaacacttctacatcttcttaccctcgtcatttaagaaattcaagctgcaaccaaggaaatcaaagaggtcacttctttgttcttcttcgactttgtatctaatttaataagatcttcttacccaaacatctcttctcttctcttctacttcatcacttcatctccgtacgctcctcattttcaaccccttttctttttcacagaagttcaaccgaagaaatcgtaaag

SEQ ID NO: 191825 - DNA, 43 bp, Arabidopsis thaliana landsberg
attgtccggctctatctccgatgattccacttctgtccgatga

SEQ ID NO: 191826 - DNA, 108 bp, Arabidopsis thaliana landsberg
atggttttacaacgtatacacaaaggtaaacgtatacaagacttgccgaacaagtataacgtacaacacaatccaatgcagcctactaatgataatccattgatttga

SEQ ID NO: 191827 - DNA, 534 bp, Arabidopsis thaliana landsberg
agactctttaggtggtgtaagctttgtcataggatctacaacgaacaagaatcttgtcctttaaaccttgtggctcagaaggagacgttaccgtttgaaaaagataatgacaaaagcttgggaaagctgacttcagggaagaagttaactctttctactcctactgcaactctccagctcagcacaaatggaaggattcacccttcgtggtggagacctgacttggtcaagccaacacaagctaaagaagacccaacaacctctgactaccgcaggagaaaaacagaaggcaaacaagttgtaaatgctaattctaaacatgcttggcgtcgtattgacaattctcgatctcagaactggaacccacctgcaaatgctcgctactcaaatcatcatacgactagggatgactctcagggctatgatcgacgaattgaatggagcacagcttcaattccccgaacacgggagaaacttatgagaccttcagagattaagggcccgtgtacagtccccgagatccctcccttataa

SEQ ID NO: 191828 - DNA, 213 bp, Arabidopsis thaliana landsberg
aacaatatcgacttaattcctgcatcaggtaaactttttccactgtgaaactttcctctctacttcctccctggttggctcaagctcaaccaatatgtgacaggtgtatcttcttcaaccgttgaggcatttgttacctcctgccccagcttaactacgctaaagctcgtaggttttggactgaaggaagaaacagtcagaaatcttgcggag

SEQ ID NO: 191829 - DNA, 221 bp, Arabidopsis thaliana landsberg
aagatactgagcatcattccactgatcctgttgtagaagagactgagcatctttccactgatcctgttgcagaagagactgagcatcatgccactgtcaatgttcagaaccaggagtcagtatccaagaagagaaaaacaagaggacaaacaaagatgaataaagttgctaaaaaccctaaggagaaggttgatgttgagtttacacgccttggtgaacat

SEQ ID NO: 191830 - DNA, 447 bp, Arabidopsis thaliana landsberg
atgtatcggtatcgaactcaaatacgagaaattacctctggttcgggttttttcattatcaaactaatatgctacaaagtgagaaagtcaggctcagaaggaggtatgaagcacaaagcccacttggaatctccgaagattattgggccttaaataaggccagaaaatataattgaatgataaaaggaaacttttcttacatttttggcaaaatacgttccttttattattggtgtattttaatttagtttaattacttcacagcaattggctgtttttctccagaagaacactaaagacaaaaattaaaccctcacactcacagagaccggagaagaagcagagagaaagagagagagagagattcaccggtgataacattgaagcagaaagattctccggtgataacattgaagctgaggagcaatgtatccgactggtcaacag

SEQ ID NO: 191831 - DNA, 325 bp, Arabidopsis thaliana landsberg
atgaagatttttcacacgctacgggtaattaaggaagatgatgagagtaaaatgaggaaccacaaagtaacataggaaaacaatgatataattcattcgcgtgcgatttacatataatttcacaacaatctacttttgtttgtatcatgtaataaaggtcatccttttgttccttaatatacgggatgattttgatcacacatattacgtatacatgatcaaacaagagttctttagtatatttgaaagaattgttgacaagaaagaaacaaggtttcgcatgtacgagggggtatctgctcgtgtgggctatacatgtttttga

SEQ ID NO: 191832 - DNA, 80 bp, Arabidopsis thaliana landsberg
atgggagcggctcccatgactcgtcaacgaaaaccccagattttgctgtgcgattgtctggatggaaagggttacccgag

SEQ ID NO: 191833 - DNA, 60 bp, Arabidopsis thaliana landsberg
atgaggaatattgaggatcagagaacgaaaacttggcatgaaggagagagtcttggaatg

SEQ ID NO: 191834 - DNA, 227 bp, Arabidopsis thaliana landsberg
gacccgctatcgaagcagtcggaacggcacgaaagtcgttctagcagaaaagttttcaagagttaggacttgttcggcagcagaatccctcgttcgagcgtgagttacttttcacggaaggtgatgagtgaggtatccgtatcccggagcgtaggagtccctcggctcggtcggccttggctgcttacgtgtactccatcgttttcaggatcccactttcgaagtag

SEQ ID NO: 191835 - DNA, 171 bp, Arabidopsis thaliana landsberg
gtcggcggctggcggatcacctgcgggcggttgaacgtcgtgctgccgatacgcaacaaggggctgcgctatcgcaatcgtcgcgccagaatcgccgtgcgagagcctgagggatgcgccgtcggcgccctgttaggaacgctgcggtggatccgctgcacgattggtgag

SEQ ID NO: 191836 - DNA, 228 bp, Arabidopsis thaliana landsberg
aagaagaaggaggaggaggagaagaattggattcgaatcttcgaaaatcggtttgatggtattggtgagatttagaggaatctatgtggatgctgacgtggcgtcgtcgtggcgagcggagaatcgaccgtcagagacaaggttctcatacggtggcaagtggtttttaaactcttttgatttgcgtgcgtctccacagtgacgaagacgaagaccaaagagaaatag

SEQ ID NO: 191837 - DNA, 356 bp, Arabidopsis thaliana landsberg
atgacgcgcggcggtcggagggacagggagttactggcgcgcatgaactcgtgtctaccgtcgtggcgacttcaccggcgacgattagatggctatagagagtcacggcgacgcgacggaggtaccagagcacgtggcgcaagaccggaaggatctgtcgccggtgagcttatctgctcaagccgcaaagcacgggggcacggtggtgagtcatcggagttatcctcaggcgacgagctattacctggcaggcttatctagttactggcggcgtcaatcgcaacgacggcggcgtgaatcgcggcagagatcggtcatcagcggcgagactgtcgcgctggcgttctgatccatag

SEQ ID NO: 191838 - DNA, 462 bp, Arabidopsis thaliana landsberg
caaccttcgatcagaagttatcaagctgagaaatgaagccttggagaaggataaaattctactttcattggtggacaaagtgaagaaagacgaagcaaaatttaactctcaatccgaagctcataaagccgaagttgaagaccttcggaaaaaacttgccaaagctaatgaaaattttgaacttgcaaaagtgaagcaagaaataagtgaatggtcaaacactaggctggagaaaaatgttgaggaattcgtgaatccaaggagagatgttttgagaaatccttcgattgcgtaaggaaattgaaaaccagctttgccaaggtgggtgcatactcttctgaagagaatttcatccaaggtgaccccgagggtgttattgattggataagcggagaagccgatgcttttgaagagatcctcagtgatcgcggggacatttgtgccttctccggcgctcgaggg

SEQ ID NO: 191839 - DNA, 290 bp, Arabidopsis thaliana landsberg
tgctcacaacaacaatttcattgggcctaagaagtgatcattccgatgaacgtcttcaccggaaaatctatcgtaacaatggtcaaaaactattttgtcaagaacaaattccaatcatcgaaccgttggactcatataggtggagtattggaaatgtgaaaaaaaaagaaaaaggtaaaaagaaaattaaaagagaaaaattctttgtaagcatggtcaaaaaatgctttaaccaaactaaatctagaataaacaaaatacccgatatccgaacaaattctaaacagtga

SEQ ID NO: 191840 - DNA, 612 bp, Arabidopsis thaliana landsberg
ccatatgatcttatggatgatgataaggatttagggaaacaatttacacatttggtggatgttgttggagctcttaggaaaaccgatgatgctgatggggtatgtaactagagagcattgtctgtgacattaaactgatgatgctgatattcttttattaaaaagcacaagagagtaatctttgtgttatattacgtgttgcaggtggagaaagctatatatgttgcagagaaacttgtgcgagcatcacctgatgaattgactcatatagctggtgaccttgctcgaactctggtacaggttcgctgctctgatatagcaatcgaaggtgaagaagattcagctgaagaaaagcggcaaagagctctaattgcgttgctcgtgacccgtccatttgaatcccttgaaactctaaacaatattttgtattcgcctaatgtagatgtaagtcagcgcataatgatacttgatgtcatggctgaagcagctagggagcttgctaattccaagaccctgaaacctaaacacgaagcacggggacctctgatatcaaatatatcagatcctcaaccctggtatttgcctagcaatgcgagtaccccatggaaaaag

SEQ ID NO: 191841 - DNA, 813 bp, Arabidopsis thaliana landsberg
atacttttgatgtccgaccatcggaagaatgtgctcattctggtggaatttacgtatcgatttaactcttcatggactcaaattccaggtaatgcggtggcgattcattttttcggaagcaagaaaaaaaaaaagaaaaaaacgtcctatgattgtccgagatgtcccattggctacacaaccttaacaaagaagtcctgagtctacacaacaacaacctttgtcacctccaaaaaaggagcacaagtttaggaagaagcaaggctgagtctactaaggtcaactcaatcgatcaagccatggcacaatgatgcagagaagttttcttggagtttcttcgaaaatcattagcgtatgaacttcaacaattacaaccttgacatgacaagatcatatttgctcaaaaacatttggatcatgtatgaagcatcgaaaataagttcaactatggtgtacacgtttactccttaacgtgaaaagtctccatcttaagttacgcaaaattgttatgacgagaagcatacatatctaagaccaaaacggtgggatgaagacaactgaagtcattatctacaagcaaataaagcaaatcttctccgaagtataggagaattttatagcattatcacttgacgtgattaacgaatcgttgctacaaatttggagtccttatttatatcatcacccaaaattcaaggagtcaacattcgacatttatcaacaagaagcgattcaagtttgaagaaacaactttgatgctttacaacggtcttctaatggtgttcaccggcatggagatgcgaattccatcag

SEQ ID NO: 191842 - DNA, 562 bp, Arabidopsis thaliana landsberg
tttcggaatttaccgcaaatccaagtgcctgaaggagcatccgtgagaagttttttcggatacgataaagttgacaaagtattcaaggtgttatgtgtatgtgtaccacagacacagttcggagctggttggacatcaaaagaacctaagaaatatcaggtctacacggtgagatcggatcatgaaaaaccttccttttggagaccgatcatttgtaatgatgatcattcagtagttactgatgaaggactatttaatggaggtttcttgtactatggagctcggtcgagttgcaacaaacctatggtaatgaggttcaacgtgagttctgaagcgtttgctgtcattaaattgcctgaggaagtcgacattgattatcattggagattggtgaactacaaagggaaagttgccttagtgaacacctttgactctaaatttaaattcaatggagtttttgaaatatgggttaggaacgaggttgatagaaagtgggacaaggacatcattaagattcctcaatggacagaatatgttgataattataatgtttatttcaaag

SEQ ID NO: 191843 - DNA, 497 bp, Arabidopsis thaliana landsberg
atgcccgatctgcaggaagcgctggaggcggcggcaggtcaggtggcagtgccgctgacgctcgccgccgtggcaacggccgcgggattcctgtcgttcctgccgacgcactacaaaggtgtgtccgaactcggcaagatcgccggcgccggaatgctgatcgcgttcttcatggcgatcacggtgctgcccgcgctgctgaagctgctcaacccgccgggtgaaaaggagccggtcggctatgccttcctcgcgccggtcgataaattccttgaagaccatcgcatcggcatcgtcgcgaccacgctcggtctggcgacgctcggcctgccgctgctgtacttcctgcacttcgatttcaacccgatgaatctgcgtagcccgaaggtggaatcgatcgcgacctatctcgatctgcgccgtgatcccaacaccgcgaccaacgccgtcgatgtgctggcgccgtctctggcggcggcgaaggaggccgaacagcg

SEQ ID NO: 191844 - DNA, 244 bp, Arabidopsis thaliana landsberg
tttaggcgcatagcgaacatatactttcttggaatttcgtgtctatcaatgacaccgataaggtacgttaaatccaaaagctgtgttataatgtgttactattcatataacactcttgttctggtttgatggagattttgctgattaatttttgtcctgcagtcctgtgagtccaataacaaatgtagctccactgtcaatggtgcttcttgtttctctgattaaagaggctttcgaagactgg

SEQ ID NO: 191845 - DNA, 2470 bp, Arabidopsis thaliana landsberg
  unsure (1)..(2470): unsure at all n locations
atggaggttggtacttaccgaatgtgcatatcttttgacaataaacatatccaaccttgccccttcgacgtaaatgtgtatagcagtaagtccattacttttcttctttcaccatatatgattcttcgtttgcatgtttttgagattctgccatgatttagannnnnnnnnnnnnnnnnnnnnnnnnnnnnnnnnnnnnnnnnnngaagatgagtcaatatctttcaatccactggaaaacgactattttgctggcgacaatgcaagcatgctcggtttctcacaagtgaggaatgaatgtttcatttcctctgttttgcagatagttaaatcacttgacagtagcaaaatctttgtctttaaactgttgttttctattggttttgggatgttagccaggtcatggttctcttctgagagatggaaacctccttagatacacgccaatgaagaatttttcaggaaatgactcctttctttatacaatagctgatatcaatggaaacttagccgcagctacagtatacatctttgttcttactgctcctcctcagtttgtttcattttcgggcggattgcaagcaactgaagatctaatcagtcctagatatgggcaagcattcttcatttttccttgcttacataggttaatttatctttataatgaaattccacttcagctatatatagtaatcctgttcttgaatgttattatagtggcttctctggcctggagataagctactcagacctgctggagaacatttcagtaatggtacaagcactttcgggatcagtcattctgtctccgatgttgatgcagtttagacctcctggaagtggaaaactctcagttagcaatggaggtgaagatagaagggtcttaatcttagaaggacaagtaggagttatcaatcccgcacttcagtcgattcaatatctcgggtatatatgaaaccacaggtactatttgttgcatcttaagagagtttcaagttttattcatttcaactttgttttctttggctttgcctgcctcagaaatgagaattttgctggtgttgattctcttcggctgtctacaaagaacaagaatgggatcaaccatctggatgttccggttttcgttgaacctgtaaatgacccaccgtttattaatgttcctcaatatataatgctggagagtaatgggagtgagtcacttatatttcaccccgaaagagacaagttcaacttctcagttggagatccagatcttgttaatttccccggtaatgttcactcttgatcactttcaagctagtaactatccttttttggactgatgaaagcaaatttcaggtggtgaatctcatttcttagtaacattttccttggaagtcactgacggatttctgctgacaaacttaccgtcagagcttataaactcaacagagctgaagttcaaaaacttgttccaatggcagccaattcagacgtatgctgccatttctaaacacgtgaatgtcaaagctagtgggatcaggtttcgtggaactataaggcaatgcaacgacctcatgcaacagctgctccatgcgtaaattctcttcttgatcattcagataaatgtttttggttcctcatatgtacattatcatcacaaatcttgtgtagggaggagagaatggtgcggtcttgactttgaaactgagtgacatggggaactacgggtgcttccttgactgtaccgagagaatttcactgcctcttcacgcagaagctcgcgtaaacctcattaggaagagacccttgagttcccttggagcccacggtacgtttatgaaatacttggttgtggttccattcagttttttttcaattaagctttttagtttgttaatggttctgataggttaaatctggtgtgattttgtttagtctaaatctgttttgaacatgaagatcatatattaaatgcatatatgaacgtacacgtaataaagagttaggtgattggtggtatggattctagtgtcgcttgaaaaaatggtttgattggtttagtattgtttcttaggcacacctctgataagcatatgtatattgggtagagaagtgataagagaggagtttcatatcttaattcttatcactcttatttctccggttcaaatagtttaatagtgttgtcacttggtcgcagttctaggatctgtgattgtagtggagtctctcgtggtcttttctctagctactttgcttctgttcttcacttgcaaatgcgcatttctactagtacacgagaaaagaatccaacacaagaatttgcagaaaccaacggtaactaaaaacacatctctcttgttgtattttcctatagccatttatattcaagcataaaaaggttattctctcttctggagcaggacaatgccgaattgttaaacagaaatctttcaacaacaacaatcactggttgtctacctga

SEQ ID NO: 191846 - DNA, 130 bp, Arabidopsis thaliana landsberg
atcggcgcccctggacacggtcgaaccgtctgagtttttgcccggacagtctgcccttacgcagaccgtccggctttccatgtcggatagtctgggaccccagcagggctaccgcgtggcaccccaatga

SEQ ID NO: 191847 - DNA, 32 bp, Arabidopsis thaliana landsberg
gtgtcactggtgttgagacaatcaaccgctaa

SEQ ID NO: 191848 - DNA, 3 bp, Arabidopsis thaliana landsberg
atg

SEQ ID NO: 191849 - DNA, 160 bp, Arabidopsis thaliana landsberg
aatctggctcagccatttttctccattaacgatccgcttctctctctccatcgccgagacaagaaacgaaacaactaaccaaaacattcaaccagtcccacccgaaccgaaccgaaccggaattaaaaccactggttatcaaattttgtttataccgtag

SEQ ID NO: 191850 - DNA, 511 bp, Arabidopsis thaliana landsberg
atggacaagggatcaagtctcatgaggtttccagagctttcggcgaagcttcaagtagggagtcagatactgagaactgcaatcgcatctgcaatccccacaaagagcttttcaaatccttattggaatgaggatttgatgtttgtagttgcagagccgtttgaggattgcgttacagttgttgtagaggatcgtcttaatggtggtgcaataggaggacaaaacgatgtggctgttgggagggttcagattccgatttccgctgttgaaagacgaacaggagatacactggttggttcaagatggtttagcctagataacggcaacaataacaaccggtttggttctaggattcatcttagattgtcattagacggtggctaccatgttttggatgaggcaacaatgtataacagtgatgttagaccgactgcgaaagagctttggaaaccgcaagtagggcttttagagattgggattcttagtgcaactggctttgatgcctatgaag

SEQ ID NO: 191851 - DNA, 309 bp, Arabidopsis thaliana landsberg
aacctcgtccaatcggcgatcggacttctgccgcagagcgtgcagcaagtcggtgtaacggtttcgaaaaactccggcgcgttcgtcatgggtattgcgctcaagtccagcaacccgaagtacgacaagctgttcctgagcaactacgcgcaacacaacgtcgtcaacgatctctctcgcattccgggcgtctcgcaggttcgtatcttcgggcagcgcgagtacgcgatgcgcatctggctcaatccggtaaaactcgccggggaaggcctggtgcatcagatgtggtcaccgcgctcacagcagaac

SEQ ID NO: 191852 - DNA, 233 bp, Arabidopsis thaliana landsberg
agccaacgaaccagcccaaccagcaacaagagcagcatgcaaaaaacgaacagcaagaaaacgaccgggaccaaccaagacaacagcaagaacacgacaccaaggcaaacccaaggaaaaacccccgaaggaacgaaaaaaacacaccacgcaaccttaaagcacgggaaaaaaacatgaaacggacccacccaaaacaggaaacaacagcggagaaaggaaaaaaaacctga

SEQ ID NO: 191853 - DNA, 881 bp, Arabidopsis thaliana landsberg
atcaggaagtggctgaggcaggtgtgttgctaactgaagtaggactgctgaaagagagaggtctaactgctgaagctgtggtcgctgactttgttttcaagaacattcagccactgaaagatagggcctatccagcatatctgtatcgagggctggccgactcaactcgggttaccaataggagaatcccttctgtagacttggtaagccgacttgaaatgatcctcaggggtaaggtgtcaaatgttggtgctccagcggcatactcggcctagaacctgcctcctcccaaagccttcaccctttttgtgtcaaatccgcctgtgactgatggcaatttgggccttagagtgtgacctctgctgaagaggtccgttccttagttgcttcgctcggggagatacctgatgatgaacggcagatttattttgaagtgcccctgaaccctagtgatgcagacataaatgacatgctcgatctgctagctgaggattcatctgatggtgctcctgatggtacactggcagtggtgccccttccagaggttggtgcgaccttggatgtcccgaaacctgtcagtactcgcccgaggcgccctagccgaaccagtcagcccgagccttctgctgatgagcagaagaagaagagaagacgcctccggcgagtatccagctttgacgaggatgccagtaccttagctcctgctgccgaagaaatgactgcaactggccttgctgacattgatcccaatgggtgtgctccgcctgctgctgaccccaatgaggatgctgtttgtgctgttactgtggaagatgaggaggaagaaaatgaaactccattaactcggaaaaacagtcggcagttcgtcgctagcggtggaa

SEQ ID NO: 191854 - DNA, 296 bp, Arabidopsis thaliana landsberg
atggcaggtatactgtcgttcacaacaacaagtgacagattagtaaaaagtaagttagttggtaaaaaaagcatatttatgaagatttacagcccgtgcgagcgacgtcataaagtctgctcaggcgagagtatttgcgagaggccgtaggttcccccggccggttgcagacaagaccccgctttccgtgggcagtgacccgccagtcttgaagggcagccgtgcgaccccaaaacgccggccagagtggtgggagttaaaagtgggctttgtcccgaagcttcccccccccggga

SEQ ID NO: 191855 - DNA, 176 bp, Arabidopsis thaliana landsberg
atgacccaccacgacgtgttaagcactaaagctaaaccaggaagtccccagtgtaacctagacatgactagccacgtgaagaaactatggatcacaagaaccacaccggatattccagccatgaccatgatcttgctttgtgattgcaaaaacttcgccgttgggaagttgatagc

SEQ ID NO: 191856 - DNA, 399 bp, Arabidopsis thaliana landsberg
gatgctgacctgattatgttgggcttggcgacccatgaagttcatttttcaattcttcgagaggttctttatttactcttccgcatgtttttttgtattcaattttgaggtttttttatatatatatatttccttgaaagaataacaaaaaatgggtagaaaaaatggagataactagtgtaaaatcttcaatttctattttcttcatgaataactaagctgaattctgaatttcatcccacgatttaggtggtctacactcctggacagcaggagaggtgcttcttgtgtggtcaaatgggccattttgcttcaaattgcgaaggcaaaccaaagaacaccccagccgaatctgatgagaaaggcgatgaaaatgaaattgtcaaaaagccatatcag

SEQ ID NO: 191857 - DNA, 770 bp, Arabidopsis thaliana landsberg
agcttaaggccaaggaggcttcgtctttgaaaaagattgatgagttgttacatcttgagcaaagttggcttgaaaaggagagtgagtttcaaagagttactcaagaaaacctagagctaaaaacgcaggatgctttagcagcaaagaaaatagaggagttgtcgaagctgaaagagagtttacttgaaaaagaaaccgagctaaaatgcagggaagctgctgcccttgagaaaatggaagaaccatcaaagcatgggaacagtgagctaaacagcatcggaaaagattatgacttggttcagttttctgaagtaaacggtgctagtaatggtgacgaaaagacaaagactgatcattatcaacagagaagcagagaacatatgatacaagaaagtccaatggaagcaattgataaacatttgatgggtgaaagagcagcaattcataaggtagcgcacagagttgaaggagaaagaaatgtagagaaagagtctgaattcaagatgtgggatagctacaagatagaaaaaagcgaagtatctccagagagagagaccgagctcgactctgtggaagaggaagttgattcgaaagcagaaagtagtgagaacatggatcagtacagcaatggcttttctttaacagaccacactgaagattccggaaatctgctcttaaaggaacaacatatgaagaagaagaaacctttgctccggaaattcggaaacctgcttaaaaagaagagtacaagcagcagcagtcaaaagtag

SEQ ID NO: 191858 - DNA, 497 bp, Arabidopsis thaliana landsberg
atggagctccgccgcgagcagtgccgcgtccaagaccgaagaagccggagacattgcgaacaacggatccgacggcggtggaagctgtgtgtgtgccgtgaccgaggtaatctcgcggcgatcggtattcaggatctcgcgtaaagtcaattgttccgtacgtctcttcgaatcctctgaggtaaaatcgagcaccgatcaatttacgattgcaatgtacagatggatcaaagtcttcccctccgacgcattttccgttccatgacgaaggtataggtttcgcctccggcgtttccctgaaactctccgattccggccagattcctaaaattgaaagtaacaaaagtttcaatgaaatgctcaaaatgagagccctgaaacaaagaagagtcggggataaacaagagaccagtatcgaagattccgacgacaatgtcggatccataggcgagctgcggcggaggagtacgacgggcattgtcaacggcgagacctaa

SEQ ID NO: 191859 - DNA, 291 bp, Arabidopsis thaliana landsberg
ctatcgcaagtaccataccctggtggtatgaaacccaatatgcccgaggcaccagctccgccaaataatattctctttgtccaaaaccttcctcacgagacaactccaatggtgcttcagatgttgttctgccagtaccaaggatttaaggaagttagaatgattgaagccaaaccgggaatcgcctttgtggagtttgctgatgagatgcagtcgacggtcgcaatgcagggacttcaaggtttcaagattcagcaaaaccagatgctcatcacgtatgccaagaaatag

SEQ ID NO: 191860 - DNA, 57 bp, Arabidopsis thaliana landsberg
atgcagatacatttaaattcagatagatcagcaactttagattctttagatcagcag

SEQ ID NO: 191861 - DNA, 139 bp, Arabidopsis thaliana landsberg
gtcctcaccaattattctaaataaagatgatctcgtcacctgcaccagcacctactcggatgaggttttgaggaagaagcaaacgtatataaagaataagatagatctgttggagcagttacgtacgttaaaagagtga

SEQ ID NO: 191862 - DNA, 472 bp, Arabidopsis thaliana landsberg
tcgttcattaccagtagccttggagcgtatgtcaactcgaacagcatggaatgggcgtcgagactgttggagtactgcaccccggagaagatcgtgccaggacgaccgactatgctgcaagcgttcaagcaggtggaagagcttcaggccagggacgccttggtcgggcagctggtggtgagttaactttttcatagtattggttcgtatgtcgctaacacgctcgccccaggctgttgcccgtgacttgggtctttcaaagatgccctcagcagaggtgaagaaggctttggaggctccaatctccaaaaatcccctgtcggttgagcctgaccccaagaaccccgatgccatcaagctatcgacaggtggtttcctctgtctgacagcctaccgtatgtttgcatccgacattttcgatgccgattacgaccagcccgacgtcaacatcttccctgagcatcatacactg

SEQ ID NO: 191863 - DNA, 566 bp, Arabidopsis thaliana landsberg
acgagcaaacactcgccaagaatcgtgtctgcgccaacttcgtggaactgtggaagtactttagggtttcaatggatcaaggaacgatcaagatcaaactacctaaaccatcagagataacgaggaggcaaaagaaagagaccgatatgggcaagaagataaagaaagaagagaacatgaagagagatttcatcagaccaagaatggtttttcgagttaagaagatgacttctgtgatttccggtgtcttcaaccgcaagaaaacactttcaggtgaaaacagagaacagagagatggttctgagggcgatgagaccgtgtttgataaactcaagcaaaacccaattcagaagaaggggagtttctgggaaagcgcaagaattcgactgaagacactcatcttagggcaaagattgaagaggagaagaaaccgaagaagaagcttaagtgaaggaatggaagaagaggagctgtgcaagaagagaatactaatgggtgaaagatgcaaaccaatgaacggggttttgcagtatgatggtgacggaattctcctacccgagccatga

SEQ ID NO: 191864 - DNA, 476 bp, Arabidopsis thaliana landsberg
atgtctactataggtgtgaatgttcagtatcgattttggcagccacatctggtagggtgcgtatcattttctttctcctcgtagattgatatatatatatatatatatatatatatatatatcatttcgtttgtttttaactagaaaattcctctacctttgtgtacgtgtatttcagtatagtggaatacttttatctacttgtatttaataaagtttataggttaattaatttcatccagatgggttaccattaacacatgttttccacattcaatcaaaggttatgggattgcattaaaataaaatacgagaaaacatcacattctaaccaaaaaagaaaaaaaaaattacaaaagagaaaaaaaatttccttgctgcattgattgataatctactaacccttgactttttttgtgtggtaggataaagaacacaacaaaaccaagaagagatcattcagttttggctattaa

SEQ ID NO: 191865 - DNA, 287 bp, Arabidopsis thaliana landsberg
gaaggagacacctattggaccaagcattcgctggacgttcggctttggagaaaatggtcagcttgggcatagaagtaacaagagctcatcgcttccagagccagtttcagatctcccagaacacgcttacttagtttctgtagactgtggattattccacacaagcgtggtgtcctctgagggatacgtgtggtcgtggggaatggaaagaggattaggattatgccccgatgtcaacttcacagaggtggaagcaggagatgatagtgtaccaagaaagatttcag

SEQ ID NO: 191866 - DNA, 640 bp, Arabidopsis thaliana landsberg
atgatagagaagattgcaagagatgtttcaaataaactaaatgccacaccgtgtagggattttgatggcatggtgggacttgaagctcacttgagaaaaatggagtctttgctagatttagagaatgatggagttaagatggttggaatctctggtcctgcaggtattggtaaaagtactatcgctagagctttacatagtcgactttctaataagtttcagcgtacctgtttaatggacaatcttaagggaagctataatagtagtcttgaaaagtatgggttgcagctgtacctgcaagagcaatttctttctaaggttctgaacctaaaggggattaggatatgccatttaggagtgataaaagataggctccaatatttgaaggttcttgtcattcttgacgatgtggggagtctagatcaattagaggctttggctaatatcacgtggtttggtcctggcagtagggtcatagtgatcactgaaaacaaagagatttggaagcaacatggtatcaaggatatataccatgtgggatttccatcaagaagagaagctctaatgatcttttgtctatctgcttttagacaaacacgtccacctgatgagtttatggatcttgtggatgatgttgcaa

SEQ ID NO: 191867 - DNA, 298 bp, Arabidopsis thaliana landsberg
gataccatttgagagtgccaaaagagttttcgacgacgaagccatgaagacttatccatggggtcgggcagcatatgaagcccttgtcgtttctataaagttgctgaggcctattggcaagacgtacaccgtcagtggtctggttttcgtgttgcaggcttgggcgtatgagtcaatcatcaccatcgccgagcgttttgggaacgctgttaacgcggatgagattccgttgcttcaaagtttgaaggaaggtttggatcgattgagaacgatgtcaaacagattaaagagcagctga

SEQ ID NO: 191868 - DNA, 204 bp, Arabidopsis thaliana landsberg
atgaatcccaagcagcacataacgcaggaacaaagcccatcaaacagaatctcaaatccaaatcaatcaaataccaaaacattctgcataaagtcaaaaacagaaatcggaagaagaaacgcaccccatcgatatgtgaaggaagcgatttataaacccaggagctcagatagatctgggaaagctcgagatgttctcaagagg

SEQ ID NO: 191869 - DNA, 740 bp, Arabidopsis thaliana landsberg
aaccatcactgcatccctcatgaatcttcctgaaattcgaaccacctcccgacacaaacacagcaagcttcttccttcttggttcgtctctcgaaccatcgacctccgctactatctgtggagcagacgaagcagcttttacaagcggtacaatcctcatcgcacatctctctgcgggactacggaaagagaaggagagaacattccgggaaggtgtgagcggagcaatcgaggtttcacgggtcttaaacggtgaattcaccgggaagttgaattgactagagaacaaaacccgtgattccattccgacggtctaatcggagggttttgtcggaataagtgtcagtttggtcgaagagggagacaataatgaagtctcagatgattaccggcggaaagagagatgctcgccggagaaggagaaagaggtggcggtggctgctggtttcaccggagcaattttcggaatgaagataactcaaaagaaacaatgggaatcaaaaccctaaaattgaaattggggatttaatcaaagaactcaggagggaggtgttgggatttgagtccttgcttaaatcctgcaacaaagaaaaaggaatcagggagaagaagatgaagaaaagagaagaagaagtcgcaaagagagtcaacgacagagtaagaaggaaagtcaacaagaaggaaagaagttgggtttgaagggttttggtactaagaggattaatgggctgatggtttaa

SEQ ID NO: 191870 - DNA, 404 bp, Arabidopsis thaliana landsberg
atggattgggacagagaggtaacccttccgtgttaaatgcagctgtaccaggctcagtgtccatatatatcttctgtagtcacaatgtgtgagcataaaaggtaattatgtatttctgaccagaatcttagctttgttgctgaccgataaggcactgccggaaattcccttattcattgtatggaattacataagtgtcatgtgttatataaattggtccctttgtatgtttgtagggccatcgctaccaatccccaatggaagattcgcagccgtgtacatcgcgtaccctagatcatgccgataactcctcagcaagcattcctcttaaactcatcttcgaaatactatcgaggcttccgacgaaatctatcatcagattccgatccgtgtcgatgctgtga

SEQ ID NO: 191871 - DNA, 660 bp, Arabidopsis thaliana landsberg
atgaaggaagagcagcgagttatagaagccaaaataaggatgaggcagaaggaagttgaagatgatgaagaaagaatgcagaaacgtctggagtcatattcttctagttctagcactagtgcagcgactcttgatacagagtatggttctgctgcaggttagttcttctctcggtttcaactttcaacatgtgttaaattttaccacttttgttattcttggttcgcaatctcaatcagtagcttttacgcagaggatgatgaggaaattgtttcatctcaagaatcatgtcttccatctcaccaccctcaggttacaaggtttgtcattttcctagaaatggacctaaatgactttttatgagtatccatgccatggggttgtatgaacagcctttttctctatttagctgttaaatttcatttgtattagtcctatctcttgagaaactttgatgcttcgagaaccgttacagttaaaacttaaaaatgaaccccttcttaaattgtctcttattagtcagttatggtattacattttcagatcattcctttctggctaaagttatatgcacaacggtaatacgtgttggaactttgaatctgagtggttcatatcaggtgacaaatatgaggttatctggaaaactcttcagggacg

SEQ ID NO: 191872 - DNA, 48 bp, Arabidopsis thaliana landsberg
ccgccgcccctgctcatcgccggttcggtcgccccgtccccgtccccg

SEQ ID NO: 191873 - DNA, 201 bp, Arabidopsis thaliana landsberg
aaacaatccaagctcaggatttacaatcagaaaatgtttcacctcgcgctagtagatctccttcaactcgagagattccgcgtcatgattcttccccgattgataccaatcgtgtttcttctggatctaacgattgtatctctgtcccgaccacccgagaattgctccgatttgctttagcgatgcaatttcgcttgtttg

SEQ ID NO: 191874 - DNA, 135 bp, Arabidopsis thaliana landsberg
ttgcaaccgcccgaaacgccatcatgggaaacaccatcgtctgtatggtatactccaagaaccacaccatggagaacaccacagagcacacaatccacaccagttggccaaatggtcttaacaaagccagcaacg

SEQ ID NO: 191875 - DNA, 311 bp, Arabidopsis thaliana landsberg
atgccgatgacgagaagaacgacggtgtacggaactctagtgccgttaaacaaatatctacaagcggtgccgagaaccagcgaagttcccgcgaaaataacagcatcaacaggactcgaatcgttctcagctgaatacgaagaagatgcaattgctttctccggtgatttgtacggcaacgccgcgccgattatactcgtcatctccggtagaaagaagcaaacgatcaatctttcgttttgccagtgattacggtcaaagatgcttttaccgaaccgaatctgcttcgtttaagagtgaaccaagattga

SEQ ID NO: 191876 - DNA, 62 bp, Arabidopsis thaliana landsberg
atggaggctgatcacggctctagtctgcagcggcgcgccgacgatatggacatctggcaacg

SEQ ID NO: 191877 - DNA, 119 bp, Arabidopsis thaliana landsberg
atttgaccaacaacaccaagccagtttcagagagtctctgcaacaatggagaggtcacgggtcagaagaaaaatcattgctttacattgagtttgtggtctaatgttcatcatcattaa

SEQ ID NO: 191878 - DNA, 92 bp, Arabidopsis thaliana landsberg
atgacgaacaaggagaaagctcgagagagaagggagaaaagaatgcaggagatctctctccttcgaactattccttactctgaccaccatag

SEQ ID NO: 191879 - DNA, 385 bp, Arabidopsis thaliana landsberg
cgccgcagccggcactgctccctgcgaagggccttcgtcaaccgctgccaccactttttttccccggcggtcagcatcatcggcatcgtcatcccccgggtagctagcatatggcaaacggttcaactcaaaaacgcggttcaaccgaacattcgaaccgtggatatcccaactccgcagggtctcggtctttggcacatatcttcctacaatcttcgtggcctcggcctccactttgcgcacgaatgcagccgggttccgaccccgtaaatccacaacaaaggcaggacttcgcaccaaccagtcgcccagggtcgacatccggcgcgggcacacttcgcccagtacccagccatgtccaagggctacactccatagccaataa

SEQ ID NO: 191880 - DNA, 243 bp, Arabidopsis thaliana landsberg
attcttatgcacggggtcgaggaagagggcgtgggcgtggaaggggctggggtagaggtggctacggtggctatggtggatatggaaacaaccaaggtggctatcatcagggtggtgggtattatgacaatcaaggtggttataatggctatgataatcaaggtggatatagtggctatgataatcaaagtggatatggtggtggatatggctataaacaaggcagatatgggaactatcaag

SEQ ID NO: 191881 - DNA, 87 bp, Arabidopsis thaliana landsberg
aaatgatctcttctctgttattcgatttcgaaaccctaacctcctctctttaattcgcgttttctggatcgaagatggtgtcggctg

SEQ ID NO: 191882 - DNA, 730 bp, Arabidopsis thaliana landsberg
gaaaggctagagagggagtacaacttaaatcttattaccacagctccaagtgttgtttatagggtgaactctgtaaatggtgatactgtaatttcctcttgatcccaaacttttaaatattcttctttgttccctgaaaatcgcatccttttgtctttctttcttgatctagagccttattacctgtgaaatcaattttactgcagactttgtgctcaaatccatcacgccttccagatcctgggcaaaggaaatcggtcgaggagccatacgttaaggttgccttttctactggagatattgctgataagttcacacaccacatttcgtagaattacatttccttactgcaaaaccattttatacagattgaactgctcacaccaaaagactatattggtgcgcttatggagctcgctcaagagaggagaggggagttcaaagaaatgaaatatatagctgagaacagagcttcaatcctctatgagttacctcttgcagaggtgagatctctgcttgtgcagagttaagataaccccaatgaaagttgagccatgtctctcttgattatgtaaaatgatcttcttgttaatcgctccctgccattttgcagatggtgggtgatttctttgaccaattgaagtcgagaaccaagggatatgctagcatggaatactccgttagtgggttagatctttcaacttttaaccgcagatctttctcttactat

SEQ ID NO: 191883 - DNA, 453 bp, Arabidopsis thaliana landsberg
aacatcgtcatgttgggtcaaataatttcaatttgttgagcatcagaagtcacactatatttacactggtacgtcttcatgctccaagctccaagagcttgtcatattgtaatttgtagcctcttttcagtgtcttggcctgatgtattgctcttacaaggtgtccttacaatgtacatgttttgaagtctaatttgtatgtgtttgcagatggttgaaagtagtgctactggacatgaatatgagggagtcatcttttctcaactcgtaagggcctatatctttttgctattgtataagatcaattagttttgaaaatgggacctaactgtatattttcttgtttagaatttgattgacttagctggatctgagagttcgaaaactgaaacaactggattgaggaggaaggagggttcatacatcaacaagagtcttctaactcttggaact

SEQ ID NO: 191884 - DNA, 331 bp, Arabidopsis thaliana landsberg
atggatagagcattcgatctttttaaagttatggaacagagagggatagcgccagacttgatcgcttacagtactctgattgatggatacttcaaagcagggatgttaggaatgggtcataagcttttctcgcaggccttacataaaggtgtgaagttggacgtggttgtgttcagttcaacgattgatgtatatgtaaaatttggggattttgcaacagcttctgatgtgtacaagagaatgttgtgtcaagggatttcccctaatgtggttacttacaccattctcataaaaggcttgtgccaggatggtaggatttacgaagcttttg

SEQ ID NO: 191885 - DNA, 669 bp, Arabidopsis thaliana landsberg
atgtacgcgcgccacgcaagcttcggcgacgacctcgcacaagcctacggcatcgcgtgggtcgaagacctgttcgcccccgcggacgaggacagccgctacaccacggatgtcgaggccttcctcggcgcccagcaagagtggatgacggcgaaccttccgaagaagggcgtcatcgccgagaccacgaactggggcgaggtgaagctgccgccgaaggccgagcgcgtctacggcaaaccggcgaagtcggattgcacggcgatgtatctcgaccgggacggccgcgtgcagaccgtgcactaccgcatgccggcgacgaagaagccgaagggcaagggcgcgaccgctcccgacaacgccgcggacgacgtcggcgaggtttcgaagccgcgtcccgacgtcacgcgcaagggcgtcgagatgatcggcgaccttcgcaccgacgcgctgcgcgaagcgcttggccgcgcgccgatcgaggacgacacgctgatggcgttgctgatcctcgccttcgctgggcagaacgtctcggtgacgacgggaaacggtggcatctactatggccacagccgcctggcgaagaacgcggtggtgctgttcgatgccgacggcaagctcgccttcgacatggacacgctgcgcgtcgcggcgcgcacgatgctg

SEQ ID NO: 191886 - DNA, 259 bp, Arabidopsis thaliana landsberg
atgttgtatattcaaccggtgaataaatggccgataaatgactctcgctacggggcggatatcgcgggcataaaggcagatggtagccgctttctaattgagattttcgttactcgcaaacttgccgaggaagcaaataaagtgacttatattcgggaacagaaagttcatgctattgaaattgatcatagcgaggtagatcccaatattgaaagatcggcgttgttagaacttctgtcgactgacgtagctaaacaac

SEQ ID NO: 191887 - DNA, 94 bp, Arabidopsis thaliana landsberg
atgggagtaaagtcgaaaaacaatatacctgcaatagtagctccaccaactatgtttgctcagttcagtttatcgccacagattaattatgaag

SEQ ID NO: 191888 - DNA, 326 bp, Arabidopsis thaliana landsberg
atgatttcgtcgttgtcgattggtaaacacgcagagattcttaaagatggtaagagttttgcagaggctgttagtataagtggcttgcttgagctggagatattgaaaaggaaggtatctgcgttttatcggtctaatagaggatatggtttgcctgagtatcatgaacctcaatcagttccaggacttgaagacaagaacaatgatgatgatgatgatgatgaaccaaagaatgttaatgatgggttacaatggcgtgctaaacggtctagagtagaagaagtagcagctttggatcatgaagagtcgtcgtctcttcagagatc

SEQ ID NO: 191889 - DNA, 453 bp, Arabidopsis thaliana landsberg
actgtttttgcaccaagaagcttctttggtgtagaagactacgtggatgacgacacaagccggccatacacataccaaaaagagaaaaagtcgaagaatccagacaagcatgtgtcgttcaagcaacgaacagttgcatacatggagccgttcactctagatgtcttcatctcaaagcgctttgtttcggcatctctcacgcaccgtgttacatgtaggcaagttgctgttgcgggaacaaactctaaagacgtaaaagctgttctgaggtcaagatgtgatatcccggcatgtatgtccatagggaggatcttgtctgagcgtgcaaaagaagctgatgtgtacacggcttcttatacgccaagggaccaagacaagtttgaagggaaaatcagagctgttgtccagtcccttattgatgtcggaattgatgttaaaatttatctcgattag

SEQ ID NO: 191890 - DNA, 572 bp, Arabidopsis thaliana landsberg
atgaatacaaatttgatagagttatctgaacgtgtcacaagagaagaagagccaatccctgattttgtagagtggtgggatgcaaagatcctcaccgatgacaccattaatgagttgtcgtgtgatccaaacatcctcatcatggacaccattactgagaaccatctgaatatgaaagtttttaattgtcatattgagcatccatttcccatagagccaccttcagaggctgcgtctccacctccccaacctcttaaaatgacaaaggaggaacggaagaaactgcgaactctaaggcgtgtggcaaaagaaatggagaaacgggagatgattagtcaaggaagggttgaaccacaaaaatcaaaggtgaaaatgagcaacctaatgaaggttcgtgcgtctgaagcaacgcaaaacccaaccaagcttgaaaaagagatccgcacagaagctgctgagcgtgaacaagctcacatggataggaacgtagcgaggaagctaacacctacagagaaacgtgagaagaaagaaaggaagctttttggtgatccaacgacagttgttagacgatt

SEQ ID NO: 191891 - DNA, 194 bp, Arabidopsis thaliana landsberg
  unsure (1)..(194): unsure at all n locations
atggcgacgacgatgacnccgacgacatcgtccccatggacacccaaggtacgatgcaatttcacgcgcagaatgagctgttcaaaatctgcagggtagttagcatcatattggagaaaactgtgcacacctttactttatccaatatgatcagaggcccagcaacaccagatacagtcctgtactctgcacag

SEQ ID NO: 191892 - DNA, 170 bp, Arabidopsis thaliana landsberg
atgttcacgcgccatgagggcgcggcgctgcaaggcgagtgggggcaggcatggtggcgcgggtcggtacgattgcgtttcagggcatcgagggcgtgcccctccatgtgcaggtcatggtggcgcccggcaagatgggcatgcagatcgtgggcctggcggacaaggcg

SEQ ID NO: 191893 - DNA, 396 bp, Arabidopsis thaliana landsberg
atgctcctcttggggaaggactctcttccggatgatgaatcatatgatttggttattggaatgcattttggagttgggaagaatgacgaagccatgaaagttatggacacggcactgaaatctggttatatgttatctaccagtgtctttactgaatgtgttcgtagttgtgtagccaaaggtaggacagatacactggtctccatcatcgagaggtgtaaggtacagatgagttttttgttatcttctattgacatttgaagcttttgcagtctcgtttatcaattatatgtgtatttttgttttgcaggctgttgatcggaacaagtctctttgccctagctggatactgtgtaactatattgcagaagttgcaattcaagaggataatagcaa

SEQ ID NO: 191894 - DNA, 70 bp, Arabidopsis thaliana landsberg
ttgctttggttaccccacgcaccgctacctatggctgtaccacgttcgttgcacgctttccggctatcac

SEQ ID NO: 191895 - DNA, 120 bp, Arabidopsis thaliana landsberg
gttgcgccccaggccactccaatctccgttgaggttgcggctgatgaacaggtagctgataaggtggtggtggaggagccggctgcggcggccgacgttgagcatcagaaggctaatgag

SEQ ID NO: 191896 - DNA, 77 bp, Arabidopsis thaliana landsberg
gagtttgcaagagcgacaccggagagctggagctcgccgttgtggccagcgaccatgaccgagatgacaggcaataa

SEQ ID NO: 191897 - DNA, 96 bp, Arabidopsis thaliana landsberg
gctgaaaagcggcatcgcaagacgcaagatctggctgccggcacagagcggtttgatgagatgatgaggcaacattgcatgggcagtggttggtga

SEQ ID NO: 191898 - DNA, 74 bp, Arabidopsis thaliana landsberg
gtcagcgacgagagaaatatttttttttgacaaatgagtctcctccacgaacgtattgtcaacttgaactgtaa

SEQ ID NO: 191899 - DNA, 130 bp, Arabidopsis thaliana landsberg
atgttatcggatgatacgaagattggtttcgacatggataaagctgttatccatgtaaagaagataacaagaagctttcttgatagagccattagagagagagagaagagaaagttttggtattactgtg

SEQ ID NO: 191900 - DNA, 374 bp, Arabidopsis thaliana landsberg
aatcgaatcgtcacatccctatatgtaagtatgaaaacgtttagaagtaaagaagcaaaataaccattatactaagtttcttgaaatgcaaggaaaacaaaagaggtgaaagaaaaaaatgttatgctgacaaggttaatttttttgcagagtttgatatataagtcattttggtccttttttttaagtttgagagatccaaaaggaagtcactttgaagtcaaagtcacatgagttttttctagagttaccgaattacatcttctgaagtttatatactacaaaacgactaccaaaagcgacaatatcgtaggtcgtcttcttgtgcgactattttacaactattttacgacaacgacgtaactagtcgttga

SEQ ID NO: 191901 - DNA, 67 bp, Arabidopsis thaliana landsberg
atgcctcataatctttatctaatgagtggtgtcgtcgacgacgttgatccatctatagagcataaag

SEQ ID NO: 191902 - DNA, 883 bp, Arabidopsis thaliana landsberg
atgaagagaaaaggaaacaccgaagaagcgattgatgttttccagaggatgaagcgtgatcgatgcaaaccaaccactgaaacttacaacttgatgataaatttatacggaaaggtttatagtctaactttgtttgctatgaatacattggggtttcggaaatttcatattcatgtcattgattttcttgcaggcaagtaaatcatatatgtcctggaaattgtattgtgaaatgagaagtcaccaatgtaaaccgaacatctgcacatacacagcgcttgtgaatgcatttgctagagaaggtctttgcgagaaagctgaagaaatatttgaacagcttcaagaagatgggcttgaacctgatgtatatgtctataacgctctcatggagtcatataggtgattaccctaactctcccatagaagaatgattgcaggcaatcgatgaagctgaaatgtaacgccctcaaaatccggagacagtcgtgcaggttatccatatggtgctgctgagattttctctctaatgcaacatatgggatgtgaaccagacagagcttcctacaatatcatggttgatgcatatggcagagcaggtcttcactcaggtaaccaaaaagcttatctcgccagggatgtccattggctacatacattacattctctgtttttgatatatgtgagaaccagatgcagaagctgtgtttgaagaaatgaagagactaggcatagcaccgacgatgaaatcccacatgctgcttctatcagcttactctaaagccagagacgtaacaaaatgtgaagccattgtgaaagaaatgagcgaaaacggagtagaaccggatacatttgtcctaaacagcatgcttaacttatatggccg

SEQ ID NO: 191903 - DNA, 80 bp, Arabidopsis thaliana landsberg
gatcgaccatgatcagaagttttctagatgatatcgacacgaaatgtcagtctatagaaaccgttagcagtgatcagtga

SEQ ID NO: 191904 - DNA, 90 bp, Arabidopsis thaliana landsberg
atgaaggtactcagttgcgttgcggcagtcatcggactggcctggttcggcttcatcgtgtgggccatctacaccgtggttacgtggctg

SEQ ID NO: 191905 - DNA, 166 bp, Arabidopsis thaliana landsberg
atgggccgtcaagattaacgtccaccgagcaaatcttggattcggcaagcaagatgaattgtggacgggcgagacccaaatcactgctgaagaacctcctttccttgaaaagagtgttccatctcttgcaaacacatttaaatcgagcgagaatttgtattggaag

SEQ ID NO: 191906 - DNA, 76 bp, Arabidopsis thaliana landsberg
gctatataacatccaaactcatacaactaataacatcaagagcctatacaatgatcaaaatcaaaacaatacctga

SEQ ID NO: 191907 - DNA, 133 bp, Arabidopsis thaliana landsberg
ttattgcgttattggcccaaaccgaaatggacttttcatagacaactggtactctcgtcgtctagctgtgcaattaaagataccagaccaaaatacccttcacgtgatacaaacaacgagaaaaggaaattaa

SEQ ID NO: 191908 - DNA, 107 bp, Arabidopsis thaliana landsberg
atgcttagttataaaccgtccgatcagatgactttgaccagtgaccttccgttcaaagaatatcgacggttcttagacacatttttcaccggagtctcacctcacag

SEQ ID NO: 191909 - DNA, 232 bp, Arabidopsis thaliana landsberg
atgtttcataaggttgctattgaaaccttggttctcctacttctcatcaattacttgacacaaatcgatgtttcctccgcacaatactctcagtatcctcagtcccatgaatatcctgacagctaccttagaccccacaatgcagcccgagccgcggtcaaagtcaagcctctaagatggaatttcggtatagccactgtggctcaggactacgcaaaccatctagcctcag

SEQ ID NO: 191910 - DNA, 732 bp, Arabidopsis thaliana landsberg
atgccaggaggatacaaagcgtttgagatctgtgccaagttttgctatgggatgactgttacgctcaatgcttacaacataaccgcggtgcgatgtgcagctgagtatcttgaaatgactgaagatgctgaccgcggtaacctcatatacaagatcgaagttttcctcaactcaggcatattcagaagctggaaagacacaatcattgtgcttcagacaacaagatctcttcttccttggtctgaagatctgaagcttgttggtagatgcatagattctgtttcagctaagatcttggtgaaccctgagactatcacttggtcttatacattcaacaggaagttatctggacctgataagatagtcgaatatcatcgggagaagagagaagagaatgtgattccgaaagattggtgggtcgaagatgtatgtgagctagagattgatatgttcaagagggtgataagtgttgtgaaatctagtggaaggatgaataatggcgtaattgctgaagctcttagatactatgttgcaaggtggttaccagaatctatggagtctttgacatcagaagcttcttcaaacaaagatctcgttgagacggttgttttcttgttgccgaaggtaaacagagcaatgagctactcttcttgcagcttcttgctaaaactccttaaagtttcgatcttggttggagctgatgagacggtgagagaagatttggttgagaac

SEQ ID NO: 191911 - DNA, 455 bp, Arabidopsis thaliana landsberg
ccggatctgcgtattgccggcgtgcgtcttaacccgaaggatttttcgcccagccgccagagctatatcaacaatgttacattgaagaatatcaaaagcagcaaggaatataaaatacccggcctgccggccaatatgctggcaggcagcgttacctggagccctacgggtaagaaaattgcttttaccaacagcacaggaacaagggtggacctgtatacaatagatattgccacacagaaagtgaccaggataaataaacaagcgctgaatgtggtactgggacagggatatacatgggtggatgataataccattctttacaaggccgctgtaaatacagctgccaatgcacccaaaagacccatcacacccaaaggacctaccgtgcagcagaacctgggaaagaccgcaccgagcgttacttaccaggacctgatcaaatcgccttatga

SEQ ID NO: 191912 - DNA, 201 bp, Arabidopsis thaliana landsberg
gaggagaagcgacaggtttatgtttttggcgacgtggtcgggggtgagacggttggtggagttgttggaaccggagtgggttcgttggctggaatagggggtgaagcaacgggagccggtggttctgcagttggtgtaacaactggagaaggagactctaccggagggagaaacgtgataggtgccggagccggagcttga

SEQ ID NO: 191913 - DNA, 54 bp, Arabidopsis thaliana landsberg
atagcatgccggttgatacaccgagctgtgaatcgatacaagtacggccagtgg

SEQ ID NO: 191914 - DNA, 159 bp, Arabidopsis thaliana landsberg
ttgaagaatttgttgacctggttctcaaagactatccgatcattttatccagttcttgccattgcgatttggtggtggatgcgtgtacgagctcgtcggaaacgcgttaaaggagaaaacatggatcatcttcgagatgtgatcaaagagagagacgag

SEQ ID NO: 191915 - DNA, 313 bp, Arabidopsis thaliana landsberg
atggtgtggaaagaggcatcagagtcgaccaaccagctggtgggaggaggggagctaggccgggagtggcgagcatggtgacaggggcatgggtggaggcgacactgaggccttgatcatcagggaggcgatcgtagcactgcgaaatacaagcgacccagtagtgtggtggcccgcttgagggtggaggtcgacgcagtcatggagaagtgggttcatgacctaattaaaggccatgaaagtaccctgaagaagctggacattgtgaaggtagatgcgcacgtggtagggaggcacaagaactacggtggag

SEQ ID NO: 191916 - DNA, 166 bp, Arabidopsis thaliana landsberg
atgtgttatatcgataatatcacaaaaattcctattcccaccaattttcttgaggcacagggcactaaagagtggtgtgatgctattgatacggaaattggtgcgacggaagagaaagacacttgggaggttacaagtttacctaaaggaaagaaggcagtgggtt

SEQ ID NO: 191917 - DNA, 131 bp, Arabidopsis thaliana landsberg
gcgattgcgaggtgctaatcaacatcatgaacggatctaccaacaacgacattgctatagaaggcttgtgtaaattaagatatccattattgggcatccaagttcagagaattaaatttctcctttactag

SEQ ID NO: 191918 - DNA, 345 bp, Arabidopsis thaliana landsberg
atggcgtccgccacatcggcgccgcccgccacctccatgacgtggctgcgcacgcgattggggctgtcgcgcgtgaccaagatgggcggcttgggcttgttcttggaccccggccggcgcccgcggggccgccggcatgggcgccgccacctacggcgccaccgagacatcgttggtctcatcggctccgtggtcgcccggcgcgccgactgccgggctgctggtctccggatccttcatggacgggggctccgtcttggggttggggcctccggacgcgtgctccggcaggcccaagtgaccgggcacgctccaccatcggttcgccagcttgacgcgcctctt

SEQ ID NO: 191919 - DNA, 381 bp, Arabidopsis thaliana landsberg
atgtgccctcggaaggaaatcaccgaggttaatcccaaagagttctcgcgagtgcagcattatcgcatggccttgtcctggatccccattcagaaggacaagttcaaggatgtcttaacgcgcatgcacgtaccctcagttttcatcgatatggtaaagcgacctagaaccgtctttaagaagctaaagagctcggtgcagggccagccgtgtgaaggtaagtcaaactcaacggtgcttgcgatcagctcactcagcagcccagtgtacgtactatccgtggactcgatcttgacccagtacacggccatgagcgtcacctactgtcccaacacccagcaagtctttggcctcttcctaggatacggttctcccgacgac

SEQ ID NO: 191920 - DNA, 45 bp, Arabidopsis thaliana landsberg
aacctgttgtggagcgttgtcactttgaagaggaggtcgaggtgg

SEQ ID NO: 191921 - DNA, 2397 bp, Arabidopsis thaliana landsberg
gctgagatgttcgggaattgcattttgtaagttttgggttttgttggaactttttgcaattcagtgagagatgtgcgtgttgtttgctgcagaaatgtgctgctggtttcgcatttgttgaattttgggctttctgtcttattttgtgcggtgatatttgtcctctttgaataaagttttcccctttttaaaaaaaagtttgcgtttagagctaagtttatgttttttgtaatcttattgagaaagttcatgaactgatatcgtgacgtcttctatgttgtaggttactggtggaggtttgattcattaaattttgctacgttgtgggatcttcaagaagaatcctttgtatgtaagattccgtttgaagattctgtcttttaatttgttagtaatgtttagtttgttattcatcttgatgtgtcttatttttcatgctctagcagtttaaatctgtcatcgaagatatggaaaacccttttgcttctagagaaaaggggtttggtaattattcagattttccaacagaacaaatggatggtttaagctcaaactttggttctggcgttaggaatttgatctctgatgatatgttcaacccttcctccgagcttatgaatttcgactctttggccgcatggtgtaacagcccttccgctactgatatattgttcgcccaatatggtctgtcgaactcccaacctatgccttttggagctttcacttcatttcatgtagctgacccgaaggctaccagtctcactcgttcgttctatgatttggaaagctcttactatggtgaagaaagatcgtcagcacaggaaatgaattctcagtttcatcgctcttcagatagcgatgagttaagtggtaaacgacgcaaggttgttaatcagaagattggttttcctaacgtactcaactgtactattcccaggtctttgagccactcattagatgagaagatgcttaaggcattaagcttatttatggagtcctcaggttcaggtgaggggcattttagcgcaagtttggacccctatcaagacaggagatcagtacttgctcagtacttgtgatcaggcctatttgcttgatccgaggttttctcagtaccgtgaagtgtcaaggaaatttacgtttgctgctgaagcaaatcaatgttcttttccgggtcttcctggccgagtctttatctcgggagtacctgaatggacatcaaacgttatgtattacaagaccgatgagtatttgcgcatgaagcatgcaattgacaatgaagtccgtggttccattgcaatacctatccttgaagcttctgggacatcttgttgtgctgtcatggaactcgttacatccaaggaaaaacccaattttgatatggagatggactctgtttgccgtgctctccaggttgatacacttttctctccctctctctctttctgctttgttctatttttttgcttatatgtatgtttgcgtgtattactatcgccagcaagattgctatagtatttcattagttggttattcaaactttttcaaagtagaaaattgaaggtcttctttactctgaagtctaaagtttttctgcggttatttcattctcccacagaacattttttttatcacgttcaacacatgttgattctaggtccttccaaacattctaggcaaaaccattgaacatagagaacttgtgtcaattttatcttgaacaatctggattttgatgttttttgcagcagcaattgtatatatataaacaacttttaaatcttatgcaagattgatttagggtatgagaatctttgttggcttaagacctgcctgagtcctctgcctttgtcaatgaaagcttccagggcagctctggagacagtttgttgtggttgcaacctgaggttacaaaacgcagttattgtataccaaaagtgttaaaaaaaaagatagtataaaatagtatagggtctgagagattcatgttttcctcttctttttcaggctgtaaacttacggacagcagccattcctcgtcctcaggtaccatctgaattagaaaaaaactatctacaaaccattgtttctcgttacgttttatacctcaataattttgtattcgtgttttctagtatctttcaagtagtcaaagagatgccttagctgaaatacaagatgttcttcgaacagtatgtcatgcacacaagttgcccttagctcttgcctggattccttgtagaaaggatcaatctataagggtttctggacaaaaatctggtgaaaattgtatactttgcatagaggagacagcttgttatgtgaacgatatggagatggaaggctttgtgcacgcatgtttggagcattgtctaagagaaaaagaaggaattgttg

SEQ ID NO: 191922 - DNA, 48 bp, Arabidopsis thaliana landsberg
cttcaactgaaacttgactccttagttcattaccaagaacgagactag

SEQ ID NO: 191923 - DNA, 519 bp, Arabidopsis thaliana landsberg
attcggagccggtcttaccggaatcaatcagccggcgatgatcgggagcttctagagagaacacaatggcttgatcggtggatggctacaaagcaatgggacgacacaatcaccaattccacaaacgttagagatcctatcaagactcttgaggctgtaacaactcatcatcatcagagatcatatccagcgactccaccgtcctgcagagcttcaaggtccgtcatggtgagatcagctagtccaagaataccatgttcgccttcctcgatgcagccaaattacatgtcggcgacagagtcggcgaaggctaaggcaaggactcagagcacgccacggaggagaccaatgacagcgaagaagcggctttgttatgcggaggaagagagtttgaggagtccaagctttaaaagttgtctctggggagatcatgaatctgattattcttgttgttacggtgatgggttcgccggaaaaatctcaccttgttctaccactgagctccggtggttaaagtga

SEQ ID NO: 191924 - DNA, 57 bp, Arabidopsis thaliana landsberg
atggtaacaagggcacctgataccacaaaccaggctcttagagtagaggcaagtgag

SEQ ID NO: 191925 - DNA, 441 bp, Arabidopsis thaliana landsberg
ggattacctggaaacgacctggaggtccaacattagaggtgggtttatctcaactaaattaggaataacagctacacgcatatatgcttttatcaaagaattttcatttgaccttgttagttgtattcataaaataattatagtctaagcgtatgtcttttggaggttcattgactcagtgtttcatatcattcttttggaagttctaaatcatatctcttaagttttagttcactttctttcagtatctcttagtttcctctgttgttggtgtttgaagttggagaaatatttgtgatttatctacatatttgttggaattactggggttttgcctatttatttgctaattccttggtttttctgtatttcagattcaccaactcgaagatcacatcttttaaaaaggaatatcgattatccaagtttcgcaaaggcagc

SEQ ID NO: 191926 - DNA, 143 bp, Arabidopsis thaliana landsberg
atggagatggcagctagaaatagagcagctcggcggacggggattgatggtcccggagacatctcgccggaaccctcggcgaaggaattattagcggaagacgaagcctcgaggctcgccgtgtggaatctcgaaccgacacg

SEQ ID NO: 191927 - DNA, 248 bp, Arabidopsis thaliana landsberg
atgggatctcaactgcatcaaacaccaaagcgacgagactcttcactcgttcctcaaaagatttcaaacgtgaggaaccacattcctgaggtcgtggaggcatccgtgatcgaggatttctatcggggatccaatgattaggttttcgtccgccatccttcagaaggtgcccacgacctctcaacaactattcagggaggccgacatctacatcactgcggacgagcgggctcaagaccccaccggag

SEQ ID NO: 191928 - DNA, 300 bp, Arabidopsis thaliana landsberg
atgcgaactcgatttctcaacatcgattacttctctactccaccttctcacgtatttgaaaccctaggcttcctcaatcttccggctcctgataatttcccggcacccatcgtctacaacggagaagaagaccgtctccgatttggctcgatcgaaaatgttagtatccctatcggaaatttgcctattgaagctgctttgtcgaagttcctttccgacgtggttcccgaccgcgtcagtgtggactatcgagtttttgaaatcgacgactcttcgctcggagtttattactcagacgag

SEQ ID NO: 191929 - DNA, 293 bp, Arabidopsis thaliana landsberg
agataaggccttggcaacgagaacacatgaccattgagtcagtggatcacgaaacgagaagcatgacgcaacggtttaccgtacctgaattctttgaaggctataagatgattacatcaactacaaaagttaatgattccgccattggcttgtatagcctcgtcgatatcagtgtggagtacgataagactggccctgagatcaaagaccttgaccaagtccaattccttgtggactatatcaatgagttggttcttcgtactggtggtcagctcctacgacgtcttaagtaa

SEQ ID NO: 191930 - DNA, 242 bp, Arabidopsis thaliana landsberg
ctcaaccgaaggtgccttcggcattatagctggctcttcagtcctctgatgggaggaatagcttctcttatttcagcagctgaagaggcctccccaccaaactcgggcaaacagtcggttcaatgtaacgcggccggtgggtaagaaccttcatctttttgcccgcagccttcggcacaggctcagctggggaggccaaagcagcagcttttctcttcttcccctatccccgcagcgagtag

SEQ ID NO: 191931 - DNA, 429 bp, Arabidopsis thaliana landsberg
atggatcaagtaattctcgtgtgtggtaaatgggtatatgagaaaacgagatggctttttgtcgttgatagtacaaaaggttgtcgtgtacttgaaggtaatagtcaaaccagttatgatgatttcatccaaatggtgtatgaggattacaatgtcaagaaaagtgtatttgaagttagtttgagttacaagatctcgaaatcaaagcaattaccagcagatactccacctgtaatcattggtaataatagacagtttcagtcttatttggggcaaacgaagaatgctactgttcgactttgtgttgaattaaaagagaaagatctagatgaatcaaaagaggaaatcattaatggtttagatatcagcgatttgccgaagacaaaagctgttgatgtatacggtattgtcgaagaaaacattgaaaac

SEQ ID NO: 191932 - DNA, 768 bp, Arabidopsis thaliana landsberg
atgaccaaccttccctccatggggctttcgtctgcaactggaaaaggaaaaggttagtgttttgaacagatttttaattaagatacaatgacaaaacctaaatatcaatgtttaaacaaaagtctaacacaattattgcaatctttgttttcaagcgagccaaaacgaaagtactacttcttgcatgttctttcacaaacagactactttgcagacagaaaaagacagattcccaaggaaaaatctccaaaatgactttgaaaatgccttccactctcctattactcaaggtacctatgaagtgcaatttataatgtctaatcacacaatgttagtcatctaatctttacacattctgttttgaattattaggtcaaagttcggccaccatcaataatgactttcattgtgaaatgtctgatgatgaatccatgcctgatttcaactatgatagttcatcaaccaatgcaacagatgaggatcaacactactatcttagtccaacagaagatgatactgatgatgaatctactatttctattccagttgctgacccatcatctgacatctgccagaacaatgcaaacccgacagaacctacaacgcctcatatcgccaaatgtgcagaacatgaaatattcattgctactcttaagaaaacggctgcaaaagcagcagcaaacccgaatttgccgcagccaaagaaaagaggaaggccacgattgaataaagatacaaccaattcggctgagactgcaacaaaatcag

SEQ ID NO: 191933 - DNA, 130 bp, Arabidopsis thaliana landsberg
tctcaggttgcttacggcatccacatcggccataaaggcttcacgttttatgattcacgctgcagccaccgcgggaaagaatccccatttgttgtttacgccaaacttgctgcttccatctgcacgggcg

SEQ ID NO: 191934 - DNA, 1354 bp, Arabidopsis thaliana landsberg
agaatgtcagaacaacaatatggctttagtgaggtgtcagaagctgcagctgttgatcaagatgataaagcgaagctttctcttaagaaaggtagccaattcgtaacttgtgcactttgctatttgcatcaaatgatgtctgtttagctggttggatagtattgtatcagtgtcacggctcgatgatatatcttcatcgttatagaagctctagatgttctttttaatgtatcgattttctcaatgggcctggcatgttttaataacttttctttgtatctagttaaaaaaaaatattatgttgtctttcatagacttttaaccttttcctttttcatttctccaatttttaatctgcccacatatttgcaggagaccaagtaaagtatgttgggtctcctaagaaggacgaagcaaaacataggtaattttactgattcacttatgtgggaatctgtttttcctttatgtgtgcttaaagattttaaatgttttcctggagatagctctacgaggatgagatggggttcatcaaaagattttatctaacacatgttggggaattagcataaatatggcagaaaaatagatgtttagcttttgcataatgttggagaaccataactgatatgtcttcattttcatgtgatccctttcgtagcatgatttgttttagtgcttacgcctctttctagcatgttatatcatgaaaatttgttactctggtgatctaggaaccttttgagctataggttaggcttgttgttgttctttcatgtgttaaccattgattttatttgaatccaaggcgagaaaaattggtagttagcttcataagtgcagtatgtaatgtatttacagctttataattcctgactcatccacccctaggactgagcaaggattgtgctctgtactccatttttcatttttcagttaattgtggcttccttgtttcctgcattaatataatctcttccatgtgcatggtatttaattactaaaaagggttttcaatttaaatcttctgatctagtttagctgtctaaaacacgcattgagagtctacacttgtttatgaacttttatcgtagtctagcaagtcacactggacctaaatatttggaatgagacttcgtattgtaaacctggatattattaccagtagttgggagttggtcactgtccccatttgtatctatgctagagaattcttccagcaatcaaactggaattatgaattcatcctcatcctgtattggcttgtaaatggatcacagggtcgtattggggaagatttccacatctgatggtcaaaagagtgcttttaccgttattcctggcaggtgggttg

SEQ ID NO: 191935 - DNA, 3 bp, Arabidopsis thaliana landsberg
atg

SEQ ID NO: 191936 - DNA, 705 bp, Arabidopsis thaliana landsberg
atggagaaaatgggaatcaaacgtgatgttgtagtcgataccatactcattgatactctttgcaaaaatagacatgtggttcccgcgctggaggttctcaaacgtatgaaagacagaggaatttcaccgaatgttgttacatacagctctctcataactggcctttgtaaatccggtagattggctgacgccgagattcgactgcacgaaatggactccaagaaaatcaaccctaatgttatcactttcagtgcattaatcgatgcatatgcaaaacgtgggaaactgtcgaaggttgatagtgtgtacaagatgatgatccaaatgtctatagatcctaatgttttcacttacagttcacttatctacgggctttgcatgcacaatcgtgtagacgaggccattaaaatgcttgacttgatgataagcaaggggtgcaccccaaatgtagtcacttacagtactcttgcaaatggatttttcaagtcgtcgagggtagatgatgggattaaacttttagacgacatgcctcaaagaggcgtggctgcaaacacagtctcttgcaacactcttatcaagggctattttcaagcaggcaagatagatctcgctctaggagtttttggatatatgacttctaatggtctgattcccaatattaggagctacaacattgtgttagctggtctatttgctaatggggag

SEQ ID NO: 191937 - DNA, 100 bp, Arabidopsis thaliana landsberg
gcgccgccgtcgatccccgccgcctgtgttcgtggccaggggagctccgaccacctctgacgccgacccgcacatcgacgtgaccgtcgcgacctcctga

SEQ ID NO: 191938 - DNA, 207 bp, Arabidopsis thaliana landsberg
  unsure (1)..(207): unsure at all n locations
anctgcgagaggtttgcgagggaagaggacaactccctcgcaaatttgcgagaattttacaccgaaattgcgtggaaaaccggatttcacggaaaagcatcgcaaatttgcgagggggttgcggaaatcattaaaacctcgcaaattgcgatgcgtagttattctgtagcaatatttgtgacgtgcaagtcttggcgagttaggtga

SEQ ID NO: 191939 - DNA, 36 bp, Arabidopsis thaliana landsberg
atgagggaacttctcaaaagatcagaagagctgaag

SEQ ID NO: 191940 - DNA, 205 bp, Arabidopsis thaliana landsberg
atgactgagcttagctctccgaatcttgactccgcctcgcagaagccaagaatctccaccgaaaaccctcctcctcctcctcctcacataagcattggtgtcaccaccggtgaccctgctacgtctccggcgagaaccgtcaaccaaatcaagaaaatcacggtactgccactagatatcctgataatcaacgaggtctcaggcg

SEQ ID NO: 191941 - DNA, 119 bp, Arabidopsis thaliana landsberg
ctagttcacttagagccgacgtcgttttgagccgtcgattactcatcgtcatcatgccgccgccgccgcggcttcttcttcttcccggagaaacgaaaccagccgtggattttatctga

SEQ ID NO: 191942 - DNA, 117 bp, Arabidopsis thaliana landsberg
atggatgaaaatgatgatgaacgtggaggacaaagatcaagactctgtgtgggattttcggagagatgccatgcacacactctgattcttcatttgctgaataggcaggtggtgaag

SEQ ID NO: 191943 - DNA, 961 bp, Arabidopsis thaliana landsberg
tggatgaaatggacctgccatttttaaatccatatttggattcattaggtttaccaaatttcaaaaaagggtgtaactttgcagcagcaggatccacaattcttcccgcaaacccgacctcggtctctcctttctcctttgatcttcaaatctctcaattcatccggttcaaatctagggccattgaattactttctaaaacaggtgggactaattttaaaaaaaattgttggtgagatgtgattgcgtataatgttatatgatgtagaaatgaagcaatggtttgtttgatgatttttcaggaaggaaatatgaaaagtacttaccaccaattgattattattcaaaaggattatacatgattgacataggccaaaatgatatagctggtgccttctactccaagactcttgaccaagttcttgcctctattccttccattcttgaaacttttgaagctggcctcaaggtatatcaatatttctcgcttttgttttcgccaagggcgtttatttggataaatcggagtggtctcatgcaaatgagaaatttactttggcagaggctttatgaggaaggaggcagaaacatttggatacacaacacagggcctttaggatgtttagctcaaaatattgccaagtttgggacagattcaacaaaacttgatgagtttggttgcgttagttcccataaccaagcagctaagcttttcaatcttcaactccatgctatgtccaacaaatttcaagctcaataccctgatgcaaatgttacttacgttgacatcttctctattaaatctaatctcatcgctaattattcccgatttggtaagcatttcactaaaccacttatcgatcttaaccatcttgagaatgttggttataacaaaattttgaatgttttaggcttcgaaaaaccgttaatggcccgttgtggagtcggaggggcgccataa

SEQ ID NO: 191944 - DNA, 431 bp, Arabidopsis thaliana landsberg
atgaacggtcagggcatgaccatcgacgccattaacaccaaggccctgccgcagattgttgaacttggcgatatcaagtcttccatcaaggaagccaatggccagctttataacgccctgaccaagaaggcgaccgacccgacggctaacgcctcagccaccgtcacccaggtcaccgaagatctcggcaagatcgaggcccgcgtcaaggctgacgccggcaagacggccgatccggcgcagaagaagctgctcggtgatctcggcaaggaagtgaagacctataaggaagccgtcgagttcgccggttctgtcatggatgtcgatttcgcctcggtcggccccatgatgtcgcagttcgacgatggctacgccaagatgtcggacatcagcgaccagttgatcaaggccaatgtcgccgccgccaccca

SEQ ID NO: 191945 - DNA, 343 bp, Arabidopsis thaliana landsberg
atgaatcacaacgagagactagcagctgatctggcagcagtgcagaagagctctgttacaacaccacggggaaagacaggaaacctgaggaatggaagaagggagagtgtttcaaagaggaaagagcaagaaaactcgttgatggaactgaagagagaactgactgtgagcaaggaacgtgaagtttcattcgaagctgctctcattgaaaaaattcagagggaagccgagctacaaagaacagtagaagagtcgaaacaaagggaagcgtatctagagaatgaacttgctaatatgtggggtcttgttgccaagttgagatcccaaggagctgctaattcag

SEQ ID NO: 191946 - DNA, 395 bp, Arabidopsis thaliana landsberg
atgagtatggagatggagttgtttgtcactccagagaagcagaggcaacatccttcagtgagcgttgagaaaactccagtgagaaggaaattgattgttgatgatgattctgaaattgggtcagtgttaattattcttcttactcacaaagtctctggtttttttacttggagctaaaatgtctgtattgaatttgtgtttaaaagatcagagaagaaagggcaatcaagaacttctggaggcgggcttcgtcaattcagtgttatgggtcagtgatatatctctcttagctcaaacatgcctgaagtgaaagtattgctgttttgctgattttgatttaacttcacacagtttgtcagaagttggaagccaagaagataactacttacaaggag

SEQ ID NO: 191947 - DNA, 532 bp, Arabidopsis thaliana landsberg
atgttcataccaaaacgctcactgaagcatcaccgaccaatgggtcagcagaaaaagtgagtctatcgccttctaaacccaagattcgctttgtcaccatcctttttgggtctctaggagatcgaaccaatacaacgtcaccgagtccaatcttaccaaaccggtgtgataaatgttccgccaatattacatcgccggttagattaagcgtcggaagcatgctcggcccgtgaacctaaaacccaaatcaaacaaaatcagattccttggagaatacgaaagagaaatagattcagtctcgttaggtcacaaacaattacagacgtgggtcgtggagattatgtatcgatcggtgacatgaagcaaacagagaaacttggcgacgattgatacattctcgaatgcttctttcgctgttccacgccattgcttcagataactcaaaaatgtcattctcatctctctctctctctggtaaaagcgaatctcgtcagaagtgaagaaccagaaaaaggccgaaggcgagacaaag

SEQ ID NO: 191948 - DNA, 382 bp, Arabidopsis thaliana landsberg
atggatttggaccgagggtttgaacatcgaccacctatacgaggagtgacgggccctgaatacattccgtctcgacgcgaccggcggacgggtgcgcccgaacgtcccgcgcgccttatcttgctggactccggactgccgaccgaatcgcgaggcggcaggccctgacgagtcgtgcttgatcatcctaccagcgtccgaccttccccaccaggcgcgatcgtcgcggttgagtcgagtaaagcccgaacaatccgcgcggtgcgagccctcgccgaagtgaacccgctttttgattctcggaacatgcttgagacgtcgatcccagagagatcagggacgtcctgggttcgcgatgagttcgggccgtcgctcgtcctcg

SEQ ID NO: 191949 - DNA, 286 bp, Arabidopsis thaliana landsberg
tgttcgacgccgtgactgatctggcttgcggcttcggcgattttaccgtcacgatactgtgccgaccaggatgccgcctgcgatccgccgcggttcgcgcgagacagcggctgcatgcccgcgaacgtcgaaattttaagggcctcggcttccagagcggcgagcggccgtgcaagctcacgggcaaggaccgcaatcagctcgatgctggcgccttgcgcgtcggcttttgcttcggcgtgatcttcgggaggcgacgcatacgagagtgcctcgtcgttgcagg

SEQ ID NO: 191950 - DNA, 279 bp, Arabidopsis thaliana landsberg
atgccggtggccaaggtcatgaaatcgttccaggacggctttggcggcgtgctgggcttcgtcggcatcgagcttgccctgagcaccatgcttggcaagctgatggccgactccgggggggccgaccagatcgcgcaaaccctcatccgtgccttcggcaagatgaacgtgcactgggcgatgatgttcgccgccttcctggagggcattccgctgttcttcgagatcggcttcgtgctgctgattccgctggtgttcatcgtcgcccggcagtccggc

SEQ ID NO: 191951 - DNA, 133 bp, Arabidopsis thaliana landsberg
atggatcttggatactctaatgcataccctgcagcagaagcaatgaacatgcagattggaggaagagtggataatatgatggtgaatgagagaggttttcatggtcagatgatgaatgagagaggcttccatg

SEQ ID NO: 191952 - DNA, 818 bp, Arabidopsis thaliana landsberg
cccaattagcccaaccggattttgtgacttccacgcgcttctctcatttggaaatcccaacgcacactatttggcttggcgcgtgtaatcacgctctccccgaggacgtgtttgccaaacgtatcaagagtctgttgagtttatcggttcaagatcttactctaaatctcggattagtttccgggtcgggtcaaggaaaggtgacatcagtttattcactctcgggtcgacccgtttggctcggatccgggttgattcggttgggtgacatgtacggcgatgaagaaagagaagtgttggtggaactcaaatcaccttcgtctagtagatcccagagaatcatgaccgtccgatcacgccacgtggatcctacgactcaggaaatcaaaaactatgaagatcgcgcgctaatgataccacgtcccacgaccgttagatcatctgacccgagcatcgcaaggctacgaaacctccacgtcagcacacgagccgttgccgagtctcggcggttagtggaagtcaatgattactcgggggctgagcgaatgctgacatcagctagagccttgttggtgcaatacggtttgagctcaagtgattcgtgcttacgtggtttggaagctgagctggcagatttgaaccgtttgagaggtagacacgtggcggtgaagagtccagagccggtggttcagaagagtgagccgcttacaccgacttcagcgtggagagcggctgagagattggctaaagtggcgatcatgaggaagcatatgaatagagtcagcgacctccatggattcgaaaatgctagattttag

SEQ ID NO: 191953 - DNA, 550 bp, Arabidopsis thaliana landsberg
atgagctttgtaaaaacgacacgtcagcatgtcactttcgttaaccacacgtaagggtaaagttatttttaaaaaatgtttctttattaatatataggggatttatacaaatacaatgagttttatccttaccttgctttttatatttatacgaatgagcgtctttatatctattgatttatactatcttgaaaagactctagaattggtttgacaaaaatataacacaatctgcctcttcaattaatagtatagattatttttttatattttctttactttttaaaataaatttctatataatgtttttcctgaataaataataagtaaatttttaaccataagccgcctaaccctaagatcgcgaaagagaatcatcgcgtaaaccataaccctaagagaatcgttaaactactcgcaagagaatcgagaaactactcacagtttcatgcgaaccggtggagtcggaggatttgcgtccggaggatttgcgttcagaggatttgcgttcggaggatctgcgtccgtaaaatttgttatcggagaataa

SEQ ID NO: 191954 - DNA, 412 bp, Arabidopsis thaliana landsberg
cgtcgcgccgggcacgccgctggcctcggtctacgcgccggcggcgctgcggatcgaggtcgcggtgccgcagggcgccgccgatgcgatccgccgcgacccgcgcgcgcaggtgcgcctggccgacggtcgcgcgatggcgccggcggacgtggtggtgttccccgccgccgaccccgccagccacagcgtcaacgtgcgcgtgcggctgccggcgctggatccgccgccggcgccgggcaccaccgcgaaggtgtcgttcgccgcggatggcgaggtcggcggggcggcgccggtgcgcatcccggcctcggcggtggcgcagcgcggggagctcagcggcgcgtacgtgaagcagggcgaccgcctgctgctgcggcagctgcggctgggcgcgcgcgtcggcgaccag

SEQ ID NO: 191955 - DNA, 358 bp, Arabidopsis thaliana landsberg
atgaaaagcacgactaaaccagaaccgagaaagcgtgaaagttcaacgaagaaaaaacgctcagctaaagcgtgtaacagaaatgggagtgcagacttggagcacagaagagaagatagaaacatttttatatggaaagcaccaacaagtaagcccttggatcaaatagaggatacaaagcctcgctatcttctcaatgaagcaagaactgagagtaagactctagatagaatacaggagtcaaggccggtcctaactgaataccgtaagcttcccccgattgtattgaagcttccgttcaggcgtggctaaggagctcaacggacttaagtctgaaagttttgatcgctggatgtga

SEQ ID NO: 191956 - DNA, 501 bp, Arabidopsis thaliana landsberg
atgctagactgctggaagatagcagctctccagaccgcctttctgatgcaactgtcaacaccgtggcagattcaaggtatttgatttcttcagcttatgatttatcagcttattacgccattcttcaacctcaccctcatgtctcaccgtgtgtagacaagcgccaatagctaatgcagcagtcctgccccaatcccaggttacttttcttctctaagatattcggctcagacccagacccttgtacagcttctagaagcttttctcttattgagctgttaaaacacagggtcgtgttgctgcttccgaagaacaaatccagaaactcgtagccatgggctttgacagggtacgtttcttgcttcataccaacgttaactaaaacaatagtaaatagatggcttaaagtctctggattttcttcagacacaagtggaagtggcgcttgctgctgccgacgatgatctcaccgtagcagtggagatcctaatgagccaacag

SEQ ID NO: 191957 - DNA, 84 bp, Arabidopsis thaliana landsberg
atggagaaggggggggggctcaataagcgccctgtctactcactgagtatcgctcacctactcgcgctaggcagcagccgaatg

SEQ ID NO: 191958 - DNA, 188 bp, Arabidopsis thaliana landsberg
atgaattcatcgtcagagatgatggcgacggagacggctccggaatttgtaacagccatggcaactgaaactgaacggatagggaattcgagggaagtagatgaggagaaaataagccgcaagaagaatcctgaagaagaagctcttgaagctaaatgtcttcccggaatcatcagtgcttatctcaa

SEQ ID NO: 191959 - DNA, 119 bp, Arabidopsis thaliana landsberg
tttgtaatccaccgacagagaaattgcgatgtcataaatctgaacacgaattttcggtgcactcgccaacacctgatctcaactctctccagcatattccccaaattaacagtagctaa

SEQ ID NO: 191960 - DNA, 847 bp, Arabidopsis thaliana landsberg
attgttttcttcaagaatcaccaaaacctgtttcatcaagcatgtcggctaaaaatgacggtaagctccaatattgttattatggtccattaatgtgaatgatctcatcagttttgttgctcattgtcatagttataggtaaagtcattgtgcttatgggcgtaagtggcgcagggaaatcgtaagctgtttatattcttcttctcatttgtactatattttctagtttgaagaaaaatcattgatgtttattgtattgtttcactttgttagtaccataggtaaaatgttggggaaagctctatcttgcgattttcttgatgctgatgattttcattctttatcaaacagaggtaacagaatcgatatacttttgacgaatctgttgggaaaatttcatgtgttaacactaattgttcaactagataagatgcgtcaaggcattgctctttcagatgaagaccgaatgccatggcttgaaaaaatacaagagagtttgcgaaaacgtttactcgatggagaaaccgttgttctcgcatgttcttctttgagaaaacagtatagagaaatcttgagaggctctgatcctgattacaaaccgggaagctatacgagttgcaaggttaagtttgttttattggaaggtaatgcagaggtgattgctgctcggttacagaagagagcttccgaggaagaacatttcatgcctcttactcttcttcagtctcagtttgatctgcttcaagctgatgaatgtgaaaagatattcaaaatcagtgtggttctaagccctgaagttatagtcaatacaattcttgaaatggtagcaaattctttgaacccttga

SEQ ID NO: 191961 - DNA, 382 bp, Arabidopsis thaliana landsberg
atggagctagatgagtatctgggtcttcctcgtcccaatagtataacatataacttgatgttgaaaggtttctgtaaggtagggttgctggaagatgccaagaccctctttgagtcgattagagaaaatgatgatctcgctagcttgcagagttacaatatttggctgcagggtttggtcagacatgggaagtttatagaggctgaaacagtcctgaagcaaatgactgataagggaataggaccaagtatttattcttacaatatcttgatggatggattgtgtaaattgggcatgctatccgatgcaaaaactattgttggtttgatgaaaagaaatggtgtttgcccggatgctgtaacttatggctgccttcttcatg

SEQ ID NO: 191962 - DNA, 426 bp, Arabidopsis thaliana landsberg
gagatgaacaaaatcgaagcttacaccgaaacccgtcaagatccacaagagcttgttgaaagatacaagagacgagtccaagcagaagcacgtctctaaccagatggttctccggatatctccatttacaagggtttagaaggatcaaatgggaagagatattgtaaccaaagttttttatatatataaattatattgtatcggtaaaagcatctacatgacatgcaacaattgttttcatttatatcagaattcatgagaccaagtcttcgactagaacgaaattgcgcctgctgcttttccatcattgcccataagatcgtgcttgctgcttcattaaaattcggtgctagccggagcaatgtgattcagagatattatacaaaaccaaaccaagtagattacgaccccagtgcccaaagttga

SEQ ID NO: 191963 - DNA, 113 bp, Arabidopsis thaliana landsberg
atgccccgagccggagtcggtaggcttgtcgtccttcggctcgttgacgaaggattccttctctttgtcgttgatcacgattcccttccccttaggatccatctcttcgggcg

SEQ ID NO: 191964 - DNA, 2263 bp, Arabidopsis thaliana landsberg
gtacggaaaggtggatggcgttatttagatactgggcaagtactgattgagagtgcatgctcagtggaacgtgttgaagaagctctaagcacattgctccctatgttgccagaaatacaatattttcggttcaacccaggtaacaaacagcattttacaacatgcaagaacactcttatcctgttgaacacctatgaaaccttgaatttcttatccatgccgatttccataatgcatgtgttttgacgtagaatctagttaatctttacatatctgggtatatgcagttgacgatcgctgtggaatggagttggatgagactgatccagcgatctggctaaaattggaagctgcgattgaagaattcatacaaagcaatccccaagtatttaaaaacgtatgcgagagattaacactccccttcctaaacgatgagaaatggtgtgataatttgaaaccacgatttatgaatggaaagctaccaaatagcagaggtatctattttaaaatttatttgcttttcagcaaaaccttctcaaactgttagcttagtaacttctatcatttttctttcattcctaaacagtagagagcagtccttctcttggatggagacgcaatgttttgcttatggaggctcagcatagtcctgactcagggagagtaaagtatcatgctcgtgcgctcgagtcattttgttcgaataatggaataaagttatcctcattacatactactgctactcctggatgccaaaaaccatctccaggaactgcttttcccacaccatttacctctcctcttataactggaagcttgcctccgagcccccttctcttcactcctgagcttggcccacaaaagttcaataggattgatatggttccgccacttagcttggatgggggacatgttgggaagacggttatgtcgcctccatcatctcctccgcgacaaagacaactctatcttccactacgacagatgcatgaaaagttacagaatttaccccaagtggggatcttacatctctcacttcaaaatgattctaatggttcgatactgaggttagtccaaaattttcagtttccaccatatcacactcagttctaaaaaggttgattctagtgaattgattatatttgctttttggtttcatttagttggcaaaatgatgtatttgtggttgctgaacctggagatctagctgataagtttctccaaagcgtcaaagtcagtatattgtcagtcatgcaaagtaatcgccgaaaggctgcatcagttctttccaatatctgttcaatctcggatttggtgcgtagcaagaaatgcttccaagttggaaatatcatccaccgttatattggacgccagaccctagtaagaatatgttttcatattaacttctttgtggtgttagtgttatagcgttgaaagctttattttatttttgatgttacttgttaatatactgtaggtgatggaagatgatcaagaaattgcatcgtttatgttccgcagaactgtaccttcggcacacttgactcctgatgatattcgctggatggtaatgttgttacttgacttttgtatacctaaaattgccgaaaggctagcttttgctcacatatatttactctcgcattccttaaaaggctagcttctacgaaaatattgtccgtatacttatgttcagtttgtttgacgggtacaaaacccaaaccatcaaagctagtgataaacataaggaaggctaataagaagaaggccaaaagtttgtcttatgctatgaacatcttatctgaaacaggtaggagcatggagagataggataatagtcttctcaggaacatttggaccaacacaagctgtagttaaagcctttttggactctggtgccaaagctgtgattggtccatcaaacgagccacaagagacaccactaatcacatcccaaggctcatctgagtacaacattggagatcagaacgggaagtttgagattggagaagaagaagacgaagatgaagaagtaaacgaggaaacggaaagggaagagatggaccctccgacaccgacaagtgactgggaagatagcgaccacgacaaaacaaacagagacggtaagtattgtggtctttgggaagatgatcaagaagaagtgtctgagtttgtttgccagttatatgaccagcttgttcagagagaactcaagagttgatgttgctcttcaaaaagctcttgcctctcatcgaaagctcag

SEQ ID NO: 191965 - DNA, 569 bp, Arabidopsis thaliana landsberg
atggctcctaccaagtgtatgaagtcagagaacatcatgttgaccatgctcatccctggaccaacagcccccagtaacaacatcgacgtctacttacaacctttggtagatgatttacttgatctgtggaatgatggtattcaagtttatgactcctttatgtaagagacttttacacttagagcaatgttactttggactatcagtgactatccggctttagggactctggctggttgtaaggtcaaagggaaacaagcatgtaatgtctgtggtaaagatacaccacataggtggttgaagtttagtcggaaacatgtttacttaggcaatagaaagcgtctccgacctgggcatccttatagacgtcgaaaagcttggtttgataacacggttgagaatcgaactacaaatagaattcaaagtggagttgatattctagagacattaaaggactttcgcaatgattttgggagaccgctggataagagaagtaagagaagcagaactgatttggatgaagagggcgctaactcagaagaagaagcagaagaagataatgataagtg

SEQ ID NO: 191966 - DNA, 176 bp, Arabidopsis thaliana landsberg
gtcaagaaatgggatctttcttttgcatccgtgtggaacggagtcgtgtggctgatgcttttgaatttcttcggccagattgtgacttcaactgcacagagatacctaaagaaacaacaagaagaagaactagatgccttgaccaacaagtcgtcgctgagctcaaagaaatctaa

SEQ ID NO: 191967 - DNA, 1799 bp, Arabidopsis thaliana landsberg
atgaatgggagcttactgtgctgtgatggttgtccggctgcatatcattctaagtgtgtcggtcttgccagtcaccttttgcctgagggggactggtactgtcctgaatgtgcatttgatcggcgtgcaccaggattgaagcctgataagcaaattcgaggcgcagagtttatagagattgatccgcatggtcgaaaatactacagcagttgtggctacttattggtgtaagtttctttcttcgattctcatagctaagaatggttaatgcatgatctcaatggaatcaaaattgtggatatggatcactataattgttttttcatagtaaacaaacaaatgtttatatgaatattagcaaaaaatttgtctaaatcagtagtctgacgagcattggatatacatgttggttttaggtttaaaaacattaccccctaattttagctagctgaggattaactaaattacacagaattaactaaaatgtacagataacatgataaaactgtgaaactatgcgtccttcccgtcaaattttccaataagttgaattgcatgtttaaatctgtgaaaagccttttttgctcgttatttagatgcacatggtaacccttactatccctccatgtatacagatgtggaatattcttatcatttatttctacgaacttctttcatatgttgattgtaggaactgttatacattttagtaggttggttgatgtcgtccactatgaatttgcaggatagatacagatggcacaggctcattgaactactatcatgtgactgatgtgaaccttgtgctggagcagctaaagtcatgcagtagtttctatgctggcgtagtaagtgcaattagaaaacacttggatatccctgttaggccagtaaggacaatcagcggtctgaattcccaaatgtctgtatgcatggataagtcagtcaaaggaatgattccttcaattgatgggtttggggctcctctaccagcttcagagaaacagtcaacatctggtgctaaaaaaaagctgaacaaagcaaccagcaatggatggtcacataatcatggtcctaggactcgccggaagatatcagattcagctactgcgctagatatccttaatatgagttctgaaggatctgctgaaactgtacaaaatggttcagatgtccagagacttcatgagccagcatcatcaagcatgttggatatcatgaaagagccaaatatgaattcccaaaatttggctaaaataaacacacggaaaggaactaaaccaaatgtgcagactgaaacaggctacagaaaccaatacatatttgctcagatgactagatcagtttatgaagagatgatacgtaagtcaccaatccgtaccaatgatatgagatctgatgaagaaatagcttctacccaggtgaggactatattgatgaaaaccaccaaatttcaatggcgaaacatccaaagtctctacctagatgcatggaaagaaaattgtggatggtgtcattcctgcaaaaattcttctgaggatgccggtagtgagataaattgtttgtttaatatgagtctcggggctttacgaggtctttcggaaagtgaagtagctaacattcaatcctttgagaagaacagtcatcttctggccatcatatgccagattctttccttggaaagtcgactacaaggacttttggttggtccatggttgaatccacagcactccagcttttggcgtgaacacattctgaaggcatcaaatatctcaagcttgaaacatttattggttgat

SEQ ID NO: 191968 - DNA, 98 bp, Arabidopsis thaliana landsberg
agttaaattacaaaatcgcgatgactcatgaaaagttcaagaagatttttaacatctacaagagaaaagagcgagaaattagaaactacctggtttga

SEQ ID NO: 191969 - DNA, 158 bp, Arabidopsis thaliana landsberg
atggtggattcgaaggactttgcggtgagtgtattcgacgcgttggctaggagaagaagacagaaactggagaagataacgaaagatgaacttcatgatttctggttacagatttctgaccaaagcttcgacgcacgtcttcaaattttcttcgacat

SEQ ID NO: 191970 - DNA, 187 bp, Arabidopsis thaliana landsberg
atatttaacggttttgaatttctatacccgaaccaatccaaactcgatgagactcgaaccaaagcctaaccaatattttagttttaccctcatagctcttaaacttctctacgtaaaaggaaccgtacctgatcggattttaaccgagcccgacccacaataccgttccaataatcttttcttttga

SEQ ID NO: 191971 - DNA, 105 bp, Arabidopsis thaliana landsberg
atgtgtctaaaccggcttatagtttatgataaccggatggatgtagctagtgtaatgggcccttatttgagggctgaatcttcgggtttaggtgaattttcatga

SEQ ID NO: 191972 - DNA, 1040 bp, Arabidopsis thaliana landsberg
atggacggcaatggcatagtcctttccttgttctctctcgttccttcttcccctcctctgatcatcagctcatcagatcttctccgaatcaaatcatttagccacattttacaattccaagacgtttctcgaccattttgtatccggaaaacgtgcagaacaaggttgcttgcgagcgacttaggtggtcaattcattatctcaggttttcaccgagctgtgtcgattttgaagacacagcaatattctatatggattcatcattcacgttgatgacgctaatgagtggttcgtgttttcattgtcggagaagtaatagataatctcaaacagagagaagaaaaaaaaagaagcaaaattaggttttgtgattttaggttaaattttttgaatgggaaacacatgcgtgggtccgaatctgaaccctaatggattccttcaatccgttagtgctgccgtgtggcggaatcagaaaccagacgatagcattaagagcagcaaggacgagagcagtcgaaaaaagaacgataaaagcgttaatggcgacgacagtaacggtcacgtttcctccaccgtggatccagcaccatccacgttgccaacaccgagcacaccaccaccttcggtgaaaatggccaacgaagaaccaccaccaaaacctatcacagagaacaaagaagatccgaattcgaaaccgcagaagaaagaagcgcacatgaaacgtatggcaagcgcaggtctacaaatagactcagttcttgggagaaaaacagagaatctcaaagatatatacagtgttgggagaaaattaggtcaaggacaatttggaacaacgtttctttgcgtggataagaagacaggtaaagagttcgcttgttatacgatagctaagaggaaattaacaacacctgaggatgttgaagatgtgagaagagagattcagataatgcatcatttgtctggtcatccgaacgtgattcagatcgttggtgcgtatgaagatgcagtagctgttcatgttgtgatggagatttgtgcag

SEQ ID NO: 191973 - DNA, 63 bp, Arabidopsis thaliana landsberg
gcatctggtctcccatggacggttgcgaaaggacaagataccttcactcctatcagctctgtt

SEQ ID NO: 191974 - DNA, 60 bp, Arabidopsis thaliana landsberg
atgacttacatcgagctgaggagtcattctggacgtttcgagcgtcatgcgggtagacag

SEQ ID NO: 191975 - DNA, 673 bp, Arabidopsis thaliana landsberg
atggcacgatgtgttggaaataggctaggaattgtgtcaactgttgactttgatgagaattcgaatcatgttggatttgtaagggtaaaaattgattggaatctagatgatccgcttcgatttcaaaggaattttcaatttgctgttgatgaaaacactgtgattaagtaccggtttgagagacttaggaacttctgttccaaatgcggttctctgaaacatgatgtgaaggaatgtgttcttgcctttgatgatgaagacccagcggaaattagcgatgatgacaatgatgatgatgataatcaaggggataacaaggataaggacatgagtgacaccgatacccttcaaacagttgaccctgcaactctcatccctggtcttactcaaccgttctcaactggaaataagggtccgaacacacaaaacactacggtcttctctgttccaagtgtctttgaagacacagacctcactgtggaaaggcttcgatacctgcacgccaaactagcgagagtaaggactcagacaccaatttccaatgatctccttgaggattcttctgacaatgcacaaaaccagtttgtcctactgaagcgaaagcgagttcaatttgaggacatgtatcgaaaggtggaggcagcagatgagatggcggtcctgagccaactct

SEQ ID NO: 191976 - DNA, 66 bp, Arabidopsis thaliana landsberg
ctcaacaagttttgtgttcaatttcaaccggaaaatggcaagcctttccatagacaagattgaaag

SEQ ID NO: 191977 - DNA, 447 bp, Arabidopsis thaliana landsberg
gttacctttggtgcattctatgctcaggtaaagaagaagaagaagaaagtgtcgaggaggatctccaggagttccaggacttcgacgagttcgaggattaggctagcgacctcccctagtcagttgcctgtggtgggtttgtttatgttggctatgttttgattctgtgtactttgattcatattatataaatgactctagtctttaatattattacttactctttattgttattcgaagcattatgctatgatgagtcatttatgtaatcgttgtgtacgtgaatttctgatcctagcacgtacatggttcgcattcggtttaccttctaaaaccgggtgtgataatgttggtgaaattcaattgaagaatgctatgaagactatggtaactggtgaactaaagccaaaaggagatgataatgatgatgatgatgactttaaatga

SEQ ID NO: 191978 - DNA, 305 bp, Arabidopsis thaliana landsberg
atggactctacaaatgaaacacaaggagcatcattctcctggacacatgaaatcacctctctaattgtctccatgtattcaggtaaacgaatatgcctgaaatactctacacaggagaacgaaactaatatcttaactgatggtctcatttttctttttttagacactattggttttagccattgtttcgtaacagctagcgcaaagacgacaaccattaggaaagatgattctgcaattttctcgatgtctccaagcaatgtatcttctataccacaaagcaaccatagcaatttgacggtgct

SEQ ID NO: 191979 - DNA, 365 bp, Arabidopsis thaliana landsberg
atgggctactgcgctagtacagcatcaatcttttcatttttacctgccatgatcgaatgtcacaggtgccaaaagaactactaccattacaacgtgagcagcttgcaccgggacgcctgtgttttacgcattttataccacgcacagttacaccaaatgtgacccagcgtgctttcgcagcgacgtgctcagccttatgacgatgggggctcctagctgccggcgccatgtgcagaaagctcttagcgcagcaggtctgctgacatgcctcgacacaggcgctttcaaagtcctgcagcgcttcatagaagcagagccacagaatcagctccggttaccggagcttttgcagcggcttaaatcac

SEQ ID NO: 191980 - DNA, 344 bp, Arabidopsis thaliana landsberg
atgcagctgccacggaagctgtcaatcttgaaagtactctgtcagagattgataagcttcttttggatatggatgcagaagagacagctgcagctgcagagaaggtcatggttgcagtgcctggcaaagggaaaaagattgttgatgctgttgcagaagaaagggactttgaccttcggaacctggtgggtcaagaattgttcgaggctgagaagaaggagatacaagaatatgggatatcctgtggctaccagccaggagctatgctctttggtggaattgacgaaggagccttaggatgtattcgagatggcgttggggcaaagatggtcggcactctatag

SEQ ID NO: 191981 - DNA, 381 bp, Arabidopsis thaliana landsberg
atgtttgcaaatctgaagggtaaactactgactgatataaagaatggttttgaaagaatttcaagaaatgaagaagcaactaatctacttactacaaaattaagcagttttgatcagaaaatttcagggttacagtaccaggaggacctgatgttgcaaagatctaacagcatgggatctcagcttgatattttgctgaaagaaatagatttgagcaacggggaccttgcagaaactctgttggagcaagaacggcatttgaatcagaaaaatgatttctttgacactgaagttcagctttatttaatggacctttgctcaaaggatgttgagttgcttgttctggcgcaaacagcaaaagaatattcttcttgtctagca

SEQ ID NO: 191982 - DNA, 60 bp, Arabidopsis thaliana landsberg
atggtcagatgggtcaattgtttgctagtgaccacagatcgtgtacaacgggtactgtcg

SEQ ID NO: 191983 - DNA, 383 bp, Arabidopsis thaliana landsberg
atgcgccagctcggcaacaaggtggcggcgcgcaacctcgccatctccgtcggcgtgccggtcgtgccggccaccgagccgctgccggacgacgagcaggagatccaccgccttgccgccgagatcggctatcccgtcatgctcaaggcatcctggggcggcggcgggcgcggcatgcgcgccatccgcgacccgaaggacctcatccgcgaagtgaccgaggccaagcgcgaggccaaggccgccttcggcaaggacgaggtctatctggaaaagctcgtcgagcgcgcccgccatgtcgaaagccagatcctcggcgacacgcacggcaatgtcgtgcatctcttcgagcgcgactgctccatccagcgccgcaaccagag

SEQ ID NO: 191984 - DNA, 563 bp, Arabidopsis thaliana landsberg
ggacctgctggtctggaatatctgaagaagtcattttccagtcggcatggttccccagaccaagcgtcttcctcgctaccattgacaaaacgttggcttttaagtgttcgaggagaagcagagagggagtggaaagaacacaaagatgctctttctgctgtcataaataaccactctggatcatcaggcctcccttcgaccaccatgcgaactggtggcaatgtctcctctgtttcaaaagtcaataccccttcatctccatttccaggtttggtgtccatctatcaattttagctatctttttgggattatttttgtaagaacttagtttagcgaacacaaaccaactggtaaaattcacctgtagaaaccgaacatgttcttaaaaatatttcatacgataagttagtgaatggtagccatcatggtgaatgcacctttgtcatttgttaatttaggtgatcatagttgcatgctggttattttctgttgcaggaatcgaactgtcagagtgcaagggagaaactgtggatcttcttgttcgcattggcctgttaaaaatg

SEQ ID NO: 191985 - DNA, 255 bp, Arabidopsis thaliana landsberg
ataaattttgttagtttcatcaaacttttaattggacccaaaatatcaatggatcaaaacgcaacgtatttgactatttgtcatgttgtaatgatgggcctaaatttgaagcccaatataaaacgagaacttcctattctaaaacaaaacccttattcttgtttgttttcgtctctctggaagacagttctcgatcggaaattgaaattctggaatcgcaaaatttgcacgaatcctactaattggaagatctag

SEQ ID NO: 191986 - DNA, 143 bp, Arabidopsis thaliana landsberg
cgggttccgttgggacggactacaaaagactgtaccggcgcgtcaattcacaccaactagtacgaagaagggaaacactgattacacgtgtcgagtgttcattcgttgatgtaaaagtagcggaactaaagcaaacggagtag

SEQ ID NO: 191987 - DNA, 1641 bp, Arabidopsis thaliana landsberg
  unsure (1)..(1641): unsure at all n locations
agagaatttggtgccattctagagtcagtaagaggaaaaccacgtattctagatgccaagaaggttttaagagttttgaaactaaaagtatcaaaagacgatcattccagtacttcagaagtttggcatcctaccaagatctttcccatcacgggaacgagatatttcggtatgtatggaaagctagaagagtcaagatttacgtcgaagtcgaatcgacgcaatccatgaagccgtttagaagatatgacccgaaaagtgaagacatgtcaagagccggccgtttggaaataataagtccaaaatacatccggccgaggagacttgatcctgggcagctccgagtagctcaccaccgaccattaggtcacccccaagtccttccctctttgcgctgccgtcattaggctcctgccctgaagcccactactcggtctgatcacttacttatctggcgaaatgacgttcttacccctaaacctaattcttgtccctcaagtattttcctcaagtataaatacttgttctaagccctaaccctagatgtgccttcatcacctgttaaccctagccgtcgcctagagctgtccactcgccgccgcacctcttgaagcttgaagaacaccatctctctctttctctttctcgttttcgtgtaagactatttaaagtagagctttgcctcttgtattctacatccaaagaagtaatctctaaacttttttttaagttttattcatcttttgttatggtttactcaacccaacttttgattagctcatttgccatgagcgagtagatctctagttgggtttgagagggtttcaaaggggaattcatggggattaatagatcgaaagtctaggttggcggtttttatggcttttttgatcgattacactattctttcaagttgagtttaatcttaatgcttgtatgtccggaatgccacctagtacttgacattaggtatttcattctttggcaaaatctcgtatgaatgcttgaactaactcaactgaataaagaactattactgttgcacacccgccgggggagacggactaatgggctagaatcaaatttgaactaaatgatttgatctggtattttgaaaccatgttagcacttactaactgatagggcaactgagtatgcaagatattagtgataatagccggctttcacctactaatcgttagggttagctggtcttgatagagtttcgtatgtccgagaatttggaagtaaacaaagataaccatgttatcacctagattgagatctatactttatttattgaaccgtgacatctggagaaaccccagatgacctaacgctttctctcttattgcttaccgnttagtttagttatttgtctcttaatttggttactcatagcatacaacaaccccctctctttattttggacctagcttcactctcttcttaaggatttctctgaactacttctctccttgtggattcgatcctaaaatactacttcgaaatactgtgcacttgcagtagtcgtgtggtctttcaggtaaaagcctaaggcgaactaaaacacgcatcaagctttttagagccgctgccggggagagattgttagttccacaagtccaagaactagagtga

SEQ ID NO: 191988 - DNA, 1363 bp, Arabidopsis thaliana landsberg
gatgtagtagtttctttccccctttatgtcgaaggcatacaatttgcatttcatgaagagaacatgatacgcactgcagttcgtgccctgactcttaatgtatatcacggtcagtcacttctaatagttctttagatttgtcacttgtatgataaaagtaatcagaacctttagcaacatttctgatgcctttaatttgttttttgcagttggcgatgaatctgtgaatgattatgtagttagtccaccgcacaccgagtacttttcaaaattaatttcatttttccaaaagcaatgcatggatctaagtgcaatggtcttgaacactctaaagtaagattcagtgcaatttcatttcccagggaaatagcttgtaaaattgataataagttatcacaaccccttttcatctacctacttattttgtttgtgtatgatttggataaattgtattctgaaagattttcatttaatctttgctacagaagcccatctccggattcaggtggaaaattgttttctgccgttgatgggattgaggacaccttgtactactttagtgatgttatctctgctggcatacctgatatcgggaggctgataacagatcacattctgcagcatctaactctcccacttcttctcccgtctttatgctcagaggctgtaaatgtaccaaatatcaccttttcctcttaattttattttcagggttgacttatttgttcctttgggatttttttttttgttacccttgttaggtttgactttttgccagagttctatttttagttcactaaagtattgattttgtggttatttcaggatatatcagttgatcctgtcacttctctttatctgctttcatgcatcctgcggatagttaaaatcaaagatttggcaaatatgactgctgctactcttttctgccctgtaaaagcattcatttcaagttccctagtgaaacctaatagcagcttggctcctgaaggccttacatatgtaaatgggcatccagacaagggtgttactgaggaggcaaatcaacagtgttcaagcactgcggcaggcatgagtgacgatggaaattcccacttatgcagtgaagatactccgaaaagtatcttcaacaattctcatatgacgtttaggtaaagtgttagcaaataagaccttgaatgaagttgggatagttgctgtcttagtattgtccttttttttttttttactattaagcttatgtgtttttttatttcttttttctttgtaaatagggagactttacttcaatatatttctgaaggagatgatgtacaagctcagggttccttgtttgtgctagccactctgctgcagacaaaag

SEQ ID NO: 191989 - DNA, 147 bp, Arabidopsis thaliana landsberg
gttagacaaacacgtttctatacgttcgccactacagcagatagccacggcggtcccaaatccgagactttcgacccgaagaagattacactcatgacgtcgatctgttgcgtcaatctgctggttgtgtacgcagttagcccgatg

SEQ ID NO: 191990 - DNA, 549 bp, Arabidopsis thaliana landsberg
atggccgcgaaggtacacccctttatctcgttttatctatctttaaataattatgcgttgattaatcattctatatttatatatgtactatttaactattgttaatatagtaagtcgattatatgcaaataggcatacttatctctggtttgaaatgtcagaaagctgtgttgcaattgggtatccccgaggagaaaatcagaatgaaagtgtttgtgaccgttgcaggatttacaggtatctttgtaagttacttttctaaatttgtagtattgatattgtgggggaaaaaaagtttattcatgaactttaatttttagtataggtgttacttcgataacaatagatgacaaaaccgggaaactgacggtagtgggagacattgatgtaccaattatcgtgatgaagctaaggaagctatgtaagacagagattatttcggtagatgctgttaaaccacctgagaaaaagcctgaaccggagaaaccggctccacctaaaccgagtgaaaagattgcatctccggttccgatgaacttagcagaacga

SEQ ID NO: 191991 - DNA, 375 bp, Arabidopsis thaliana landsberg
atggctttggtaagtgaataaaccactagcccattgctcggacttattgtagggagtaacccaaatttggttattagtaaaagctcctctcttctgcggtggatcatcatggtcaagtagactagctgctgtggctctagggacaaccttgtaacccgtcgggttaccaactcgagttgttttaccaggattaatgacgtggtattctgatggatcgtacaagctaagcttgatctgaccgtctttttcggttttcacaatgttcctaactgctttcatgtaacttttcctaggtgactcacctggcgccgtctcttgcctcttgaggttcactttaacaaaggaattgtccgggccatcgacatcgaggtcaag

SEQ ID NO: 191992 - DNA, 26 bp, Arabidopsis thaliana landsberg
actatgctctttcctttgccgcttag

SEQ ID NO: 191993 - DNA, 64 bp, Arabidopsis thaliana landsberg
atggagagagtgaaagttcaaagagacagagaagcagagattcgggatcccttcgaaaccgaag

SEQ ID NO: 191994 - DNA, 114 bp, Arabidopsis thaliana landsberg
ggcctgactggtttaaacgcggcggctgcggttgcggttgcgggagtttgcggaaacggacggttgcggtttcaaacgatatcaagcgttttcaacgactggttgagcgtttga

SEQ ID NO: 191995 - DNA, 146 bp, Arabidopsis thaliana landsberg
atgttcttcaggccaatataatgatgaccatggatggtttgcaactcgcatataacacttctttatccgatggttacaagtattacatggctatagatagcttttgcatgcaacaaattatctatcaaagtttatgcatcctctaa

SEQ ID NO: 191996 - DNA, 538 bp, Arabidopsis thaliana landsberg
agccaaaagaagtgtaccgtgtgtcgaattttgagaagcttatcagatgattcattactaggaagcacgaccgtcgatggctctgctttcttaggaccgctgctggagatagctggctcggtggcgacggcgaagacggtagagaaaccatgtcgctgccttggccaaaattggcgagtgggaaggtaaacaaaccgtctcagagaagaagtgaaagaagagggtttagagaggaaggaagaagaaaagagaagagaatgagaagaggccattactgcgagtattcgcagagatttttcggattatgcaagaatcagtggtggaagtttctcctatgagtggattcaagttttattcacgtttgcgtttgcgtttgcgtttgcgttttgtttacaataatgataaaaattgcgttttgttcagtttggaagtgtatcataggaaaaatagaatggtcgctaattatatttatccctgtataggctcaagtaggcctggacgttcggttcggatttggatcggatcgggtttggattag

SEQ ID NO: 191997 - DNA, 865 bp, Arabidopsis thaliana landsberg
gtggtggtgtcgatcgacaccatcgcttgagatcgattctcatcaactaattcgtcagcatcgtcttgtggctgcctgctcgttccatgaacctcatctatctaaacatcagtccattaagcatcgtcactatcatctgttgttgacacttcagtatcgagcccactcgattttgctccgtcaaacgctgaagcattgtgtcttccaaaagagtgtcaatcgacatcgaggtcgtgtcggtcgacactgtgacttagtgtcgatttgttctgcaaatcagtgtggcaagcagtcgtgagtggttactctaaggtctggtgctgaattctactctctgactgaactacactaacatcctctatgttgatccgagcattcaagtcctgaacatcatcgtacagactatcaatccgttgattcgtaatcacttggcccttaagaatttgttctagcatgtattccatcctaatcgtagaagtgggtggaggtgtcaatcgacacaaaccccaaattcctgcagctattcatcaagctttggaaccacgttgtactctcggggatttcaataggctagacatgttctatgctaatcgttcagcgattgtacccccaccctttcagaggaacgactatgagcttaagcctggcttatctcatgagcagccaatggaccatatcgagcgttttgaggacctcgttctaagcatcaaagctaatggagtctcagaggactacctattgtgcaagctcttcccttatccacttgatggggaagccgcttctttgttgaaacaactaaaggcaggttccctcaagacttggagaagaatcaagatagctttcttgaaccatttctatgatgatg

SEQ ID NO: 191998 - DNA, 173 bp, Arabidopsis thaliana landsberg
atggacaaagttgtgagaatgtcgtcagagaaaggagtggttattttcagcaagagctcgtgttgcatgtcctatgcggtccaagtacttttccaagaccttggggttcacccaacagtccatgagatcgataaagaccctgaatgtcgtgagatcgagaaagccctaatgag

SEQ ID NO: 191999 - DNA, 765 bp, Arabidopsis thaliana landsberg
atggcctttttgctgctactcgcgttctcaacatcacgaaccgtttcaagcccagattgcttagaaggtaactgatcatgcatggttaacatcctcacttttcattataatcgatgacagagattccttaatcaaggagagaaataaatggaaccaaatcaaataattgttgagagacagggaagatgatgataaatcatatgaaattgggtttttagttttgatttggaatattgagattcccgtaaaaaattggttttgattttggaaagagagagaaataaagacgatggagaaaagagttgagagagaaaatgaggagaaagcgttgtggttcagagggcaatttgggaattttgatttggtaaagtgccttctcctttcaaagtgcctatttgtggctaaagtttcaaaatagtgcctctacgtgtaatattctcaaatttaaaatcgtctaattctcaattagatgttttaagtgatagacattggatcacagcccaataagtatctagagaattttttgaacactggcttataaagttattgattttcgatatgttaactaattcgaaataactagttccagccaaaaaaagttactggtttatggaaagggacattttaaaaattttgtgctcatagtaaaaaaatattatgtgcttctgttatatagttatgcgtaggtgcaaggcatatacttgctatttttcaggtatttataactcgtcttggcccgaacaagtaattgaaattgaagtttga

SEQ ID NO: 192000 - DNA, 1094 bp, Arabidopsis thaliana landsberg
atgtacagatccgcgagctggaaccgtgtgaccgaggattactcggtgccttggtccgcaccaaagggattgtggaagggcttagacgaagacgagccggctccatacgatcccactggccaagagatgactaagaaagagcagtcacgtaccaagtttgctgtaaacgccgttcacataatcccttttgtccttcttgcttgtgctctcgtcctttggttcttctctaatccaggtttgtttacaattatacacattgtgtccctattcatgatcttaggctatcatatatatttgctcgattctctatgcgtgcaaacaaaccatctatttgagaatgttgcatcttctagtctttttgatccagttatttacttgtgatagaaggccatgaatcaagtttccttaaacacataatctttcttttttaaaatcaattcggaactcacatgatagatatgtgtaacgtacatacatatttgatactcttaagtagatttgtagcgtcaaataaaatgattgcacatttttttacgtatagatgtagatgttggggtgaaaggggactccattgcggctaggattgaaggattaacgatcgaaggagacattgacaatgacagcgacggaactcagaccggattcttaggagccgccacagaggtcggacattcaaaaaataaactaaaacgcgaggctaataaacgcaatcggaggatacaagcttcaaggaaagtgatgaaaggtttttattaatcacctttttgtttgataaatatttacgagataaactttcaaaacgaattattcttttttttctttctattttgattgcgcatgttagttgatcaggagatgtgtttctttggttaaacttttatatttagttcttcacattatcttcaagatccacaagaactactttcactctgtattgacgcctttctttttgaataatctgctacaacttggaggacagcggtttgatgtttaaaaaagactagggaaaaaagtttaaacgttaccatttgtgcatgcaattgcttcttttcttttcagaaaagaatacgcgtctttccaaaaaaaccttgtaa

SEQ ID NO: 192001 - DNA, 86 bp, Arabidopsis thaliana landsberg
aacactttccatcatcacatctcagccgtcgattaagttttctgccaattgaagtcttcatcgcagttgtcgttcgatcaaaataa

SEQ ID NO: 192002 - DNA, 124 bp, Arabidopsis thaliana landsberg
atggttgatttcggcgggcattggtgggcgctcaggatcatcgaatcggctcccgctgaaaaagttgtatggcaggttaccggcagctatatgccctggaacggacataaacacgaatggacgg

SEQ ID NO: 192003 - DNA, 324 bp, Arabidopsis thaliana landsberg
atgaaaccttttttccggaacaaactcggtattacgtttgacggcgtaaaaacagctcctcatgcagaccttggcagtaccagcaggccgctgaccgaaccggaaaagcggatggtgcaggcggctgtagactcgatctatggagtatttacaacccgggtagcggatggcagaaagaaaagtttgatgtatatcgatagcatcgcacagggaagggtatggacaggcagcgatggtctgaaaacgggattggtcgacaggatcggcaccctgcaggatgccatggattgcgcggcgcgtatggccaggatgaaagaatatagg

SEQ ID NO: 192004 - DNA, 1588 bp, Arabidopsis thaliana landsberg
atgggctacattattatgtcggcccatacgtttagtctttcgtcgtcgtttccatctgcgaaagcgaaactctcctatttctctcactcaagtctcattcttacgattctcttaacgaaatctttcatcaatcgctacacttatagcgacccagatgccaaattcattgatttctcgtctggtatctccttcattacgatctcagccctcaaaaatctcagctttacggtttttaacaactgtctcagccgccgagagattatacggccagcttcaaggatgcacaagtaatctcgagaaagaattagcttcggctaatgtacaattagactcctcttgtatcaacgaggtactaagaagatgcgatccaaatcaatttcaatcgggtcttaggtttttcatatgggcaggaactctatccagccatagacacagtgcttacatgtataccaaagcttgcgacattcttaagattagagcaaagccagatttgatcaaatacgttattgaatcttatcggaaagaagaatgctttgttaatgttaagacgatgaggattgttctgactctgtgtaatcaagcgaatctcgctgatgaggcattgtgggtattaaggaagtttcctgaatttaatgtatgtgcagacactgttgcgtataatttggtgattaggttgtttgctgataagggagatttgaatatagctgatatgttgataaaagagatggattgtgttggtctttatccagatgtgattacttatacgtcgatgatcaatgggtattgcaatgcgggtaagattgatgaagcttggaggttagctaaggagatgagtaagcatgattgcgtgcttaacactgtgacgtattctaggattcttgaaggagtttgcaagtctggtgatatggagagagcgttagagttgttggcggagatggagaaagaagacggtggtggattgattagtccgaatgcggttacttatactttggtgattcaagcgttttgtgagaagaggagggttgaagaggcgttgttggtattggatagaatgggaaaccgagggtgcatgccgaatcgtgttactgcttgtgttttgattcagggggttttggagaatgatgaggatgttaaggctctttctaagttgattgataagttggtgaaactaggcggtgtttctctttctgagtgttttagttcggctactgtgtcgctaatccgtatgaaaagatgggaagaggctgaaaagattttccgtctgatgttggtccgcggggttagacctgttggtcttgcgtgcagtcatgttttcagggagttatgtttgttggaaaggtatctcgattgtttccttctgtatcaagaaatcgagaagaaggatgtgaaatcaacaatagactcggatatacatgcggttcttttgctcggtctctgccaacaggggaattcttgggaagctgctaagcttgcgaaatcaatgcttgacaagaaaatgagattgaaagtttctcatgttgagaaaatcattgaagccttgaagaaaactggtgatgaagatctcatgagtcgtttctctactgattaa

SEQ ID NO: 192005 - DNA, 381 bp, Arabidopsis thaliana landsberg
tgaagaagacaaagacacttggtgaagaaacagagactgacagtgattctgaattcaagatgagtaagggacaataccaaaaacaggaagaaaagtttaaaaccattgttagttattgcatcacttgagtacttcacacttcttttctcttctttcctgttatgctttgctaagttgtttccaggaaagaagaaagaagaagttgtggagtcttttgatgaagatagtgacagtgattcctatatttactctagtccattcgatattgaagaggattccaacagtgaggaatacaatcaaatcttcattgttatatgttaccctagtcctaatacatactatatttatataatggtagtaccatacttaccattaccctga

SEQ ID NO: 192006 - DNA, 415 bp, Arabidopsis thaliana landsberg
  unsure (1)..(415): unsure at all n locations
atgcgtatcgcgcaccgccactgccgcctcngtggccaagccgcgccnacagtgcgcccgtgccaggcggtacccgatctcggcctcgcccaccacacaccgttctgggaatcggctcagaccgcagtatcccaggaccgccgacgtccgccggtccacgactgcccacatccctaacccccaccgcgggtagtattcgttgacccagccagcgatccacgaccgcacccacggcgacgaccgcacgcagtcgccgtatcgcatcacctcgacgtcaccgaacaccgcttccatcgcctcgccgtcgccgggatgcaactgtcgaaggatcagccgtggtgtctcagtaacgaccatgggagaggcggatgacggaccaacgttcaatgggcggcaccgcgccgaccggctctga

SEQ ID NO: 192007 - DNA, 130 bp, Arabidopsis thaliana landsberg
cattcccgaccactggacggtgaccgtgaaagacaaccgcgacgtttctaaccgcgaacgactcacggaacctttgacacctgtccaacagtccccacatttagtagttttagtacttttgtatgtgtga

SEQ ID NO: 192008 - DNA, 137 bp, Arabidopsis thaliana landsberg
ccaggtaccggtcacagaccgccaggagaggggagcagccacatttagaaactttgtgaggtataagaggaagaccgaggtaaacctgagggaaggtggagaccggggcccccatgatatcagcaacgacacaatag

SEQ ID NO: 192009 - DNA, 194 bp, Arabidopsis thaliana landsberg
agttaaaaaagagtcaagagaaagttgacttacaaaggaaatcgatgacgaggcgtccgtcggataatcggccggtggatctctggaaaaacgaacgaccgttaggaagaccaatgctgtatccgagtccggcgaagagtccacccgtgtcggagttggaatcgccaaagttagaaatcaacggcggaacctga

SEQ ID NO: 192010 - DNA, 29 bp, Arabidopsis thaliana landsberg
gtaatgttgttattggacaaaaatgttaa

SEQ ID NO: 192011 - DNA, 57 bp, Arabidopsis thaliana landsberg
atgacgcctggcaaagcaggagcggcacacggacccctcggagccgccacgacactc

SEQ ID NO: 192012 - DNA, 350 bp, Arabidopsis thaliana landsberg
atgatatcattcctcataggatcaaattccggcgcccaagcttgtacggtaagctagctcccaaacactctccatggacctccagtcaaggctgccaagtactcttcctccaactcaaagcggatcataaaacactgacgaggaagatccatcacatacatggcccctcttggtttccacagttccctcaacttcctattcaacaccgcaatcgacatgctttttccaaggacttttactatcatatactgcccccacaaaccgttcatcgcctccagaacctcttctccgatagtaaccaccggttccccaccttctccatcacgaaactcaagttgcatccttgctga

SEQ ID NO: 192013 - DNA, 419 bp, Arabidopsis thaliana landsberg
atgcaagaggagctcaacaacttcacaaggaatgaggtatggcatttagttccacgtcctaaccaaaatgttgtaggaaccaagtgggtcttccgcaacaagcaagatgagcatggtgtggtgacaaggaacaaagcccgacttgtggccaagggatattcacaagtcgaaggtttggattttggtgaaacctatgcacctgtagctaggctagaatcaattcacattttacttgcctatgctacttaccatggctttaagctttatcaaatggacgtgaaaagtgccttcctcaacggaccaatcaaggaagaggtctatgttgagcaacctcccggctttgaagatagtgagtaccctaaccatgtttacaaactctataaggcgttttatgggatcaaacaagccccaagagcatg

SEQ ID NO: 192014 - DNA, 452 bp, Arabidopsis thaliana landsberg
ggtgacattgtttgcaatgccgaagcgctcgccagcctcgatgcggcgaacatcaccatccccgagatcatcgtcacctacgacatcaagccggccaagagcgatgacgaggcgagcgccgaagacgagagcgatgcgcccgccagcgacactgaaagcgacaaggccgacaacgccgccgagcctgccagcggcggcaagggcgaagtccactacaaggacgtggtgctcgacgacgtcaatgacggcgttgccgcctcggtgtcgttcggcagcattgatgttacgggcgatgccaagagcaccgggcatttcggcaagatgtcgatggaaaacctcgatatcggccggacgctgagcttttacggcatggtgccggccggtgccgacaccgagatgaagacgctctacagcaatttcaacttcgagggcggctcgttcggctcggacga

SEQ ID NO: 192015 - DNA, 175 bp, Arabidopsis thaliana landsberg
atgaaccagagcgtctcgacgaagatgacggagacgaggattccgacggagattcgaggtatctatcgactccatagacggaagaagcgacatggagattctcatggtagatcggcgggaacacaacgccatcgtccttggcgaaaattggcgattctctgatgacaaccattga

SEQ ID NO: 192016 - DNA, 243 bp, Arabidopsis thaliana landsberg
gtgagtttggttacactcgtttagttgcaaacaaagaaaagctcactgtttcttttgtgggtaatcacgatggcgaagttcatgatactgttgagatgttagcatctggggtagtaatcagtgggagcaaagagagtactaaaatcccaaatctgaaaaccgttcctgcttctgctacacttatgggaaaatcagaatctaatgctttgtggtatgccaaaggagcacgcttgatggttgtgg

SEQ ID NO: 192017 - DNA, 639 bp, Arabidopsis thaliana landsberg
atgaatggtttacgccttggagtttgcgtgaggaagaaggaaactaaagacggtgctgttcagacgatgccgtgtagggtttctcagggttctgctgattttgaggagaccttgtttatcaagtgccatgtgtattactcaccggcgaacggtaaaggtagtccagcgaagtttgaggctcgtccgtttttgttttatctcttcgccgtggatgccaaggaactggagtttggaaggcatgtggtggatttgagtgagttgattcaggagtcggtagagaagatgaattacgaaggagctagggttaggcaatgggatatgaattggggactttcagggaaggctaaaggaggtgaattggctttgaaattagggtttcagattatggagaaagacggtggagctgggatttacagtaaacaaggcgaattcgggatgaaaccgagtagtaaacctaagaatttcgctaattccttcggtcgaaagcaatcgaagacgtcgtttagtgttccgagccctaaaatgacgagccggagcgaggcgtggacgccagcgagtggtgtggagtcagtttcggattttcacgggatggagcatttgaatctggatgaacctgaggagaaacccgaggagaaaccg

SEQ ID NO: 192018 - DNA, 165 bp, Arabidopsis thaliana landsberg
gaaaccatcaacgagtccgcgggccgcgagaaggcggcgacggagatggatttcgcggaatccatgcgcaaggacctcctctacctgcacgagcattacgacctcgtcccaaaggccgtgccgctttccttttcccgcgagaaggcggtagtatttccggcatga

SEQ ID NO: 192019 - DNA, 267 bp, Arabidopsis thaliana landsberg
atgatagagaaaagcaaagtccagtggtcacagtcatcacagaaacagaaagtttcaggtatctcttaactccaactcccaagttttttcaattgtcattttctctctctagctctctctctttctctctattctctgaaacaaaaggaatttttgttagagcttttggcccaaaggtctctcactctctctggttatatgcaaaggctctattattcatttaatactactggaactagtggaacattgagtgagagagacgcatga

SEQ ID NO: 192020 - DNA, 110 bp, Arabidopsis thaliana landsberg
ctgctgttgctgatgaagatggtgagcttgtaaccgttcatgaaactgttgctgttgctgctgctgctgttgttgttgttgttgttgttgttgtactggaaacaaagtag

SEQ ID NO: 192021 - DNA, 365 bp, Arabidopsis thaliana landsberg
aggaagtctgtcatgagcatcgtcctgatcattttggtgctgctgctgatcggcgttcaaccgctgtaccagcacagccgctcttggggctactacccgtccggcggcattggcaccgtgctgattatcctgttactgctgtgggcgttcggtgtgatttaaaaaaaagggccccgcaaatcacggggcccgttttcttggctgaactccgactcaactcaatgcgcgcttgatcttttcaagttcgacaacggcttgctgcataccgctctccggcacgatttcgccctcgcgcgccgtcacctcggcgaaacgcgccgcgacttcgtcggcatcgccggccaagatgccgcgcgtcatcgtga

SEQ ID NO: 192022 - DNA, 397 bp, Arabidopsis thaliana landsberg
agcaatgattgacgacagtcgaagtcagtcaatacttgttagcggtgaaagtggagctggaaaaactgagacaaccaaactaattatgcagtatcttacatttgttgggggacgtgctactgacgatgatagaagtgttgagcagcaagtccttgaagtaagattttggttataaaatttgtgtcttctatcttgttcaatgagaaaaaaagaactggatagatgcctttgttttcctcccctggtatttgtttgcagataaatatttaggggtgatcatgtttgactttctttatttgcgagttatctattctaatttaagtattcttgttctgcagtcaaatcctctcttggaagcatttggcaatgcaaaaacagttagaaatgataattccag

SEQ ID NO: 192023 - DNA, 97 bp, Arabidopsis thaliana landsberg
cctggccggctgcagcacaggtcatgatgacaatgacaatcagaccgcgccgcaaacgaaaccggagcccaatccggaaggcactacctcagcggtg

SEQ ID NO: 192024 - DNA, 439 bp, Arabidopsis thaliana landsberg
gacaacgtcgcccaccgttcaatccagaatgcggacgcgaccatcgcctactcagtacagggccaggggccgctggtgatgatcctggcctccactggccgtggtagcgccgaattcgccccactggctgagcaactggtgcgccgcggttatcgcgtggtcctgcccgaccccaggggtgtggcgggcagtaaaggaccgatgaaaaacgtgacgttccatgatttcggggacgacttcgccaaagtgatcgccgccgaaggtggcccggcaattgttgccgggcatgcgtcggccagtggatcgcctagaccatcgccagcgaccacccacaggctgtgcgcgggatcgtgctgcttgccggtggcgcacgccagtggcccagaaagctccccgctcccatcacccggatcaacgccgtacaaaaatccgaggatga

SEQ ID NO: 192025 - DNA, 50 bp, Arabidopsis thaliana landsberg
gacgtatagaagcagaaacgcgaacaaggatgcgacaaacgttgttgtga

SEQ ID NO: 192026 - DNA, 145 bp, Arabidopsis thaliana landsberg
atgaggttctggacacatcgttttcgtaccgaatcctacaatattgccattacagtgcacgagcttgttaggtgcttgtcttcaactaaatcctacaagtcaaagcttctgatttggttagactctcgtctagagtcagccaaac

SEQ ID NO: 192027 - DNA, 341 bp, Arabidopsis thaliana landsberg
ccccgaagccgcagccagctggcggatactgtatcctttgtcctgccgcatcttggtaaggtgcgcagcaaaacggagcaatatcttttccttgccggtcattccggaacaaggtcattgcaaatgaccgattttttgacgtataatcatatatcgatcatttttccattaacttgtgtcctatgcagaaaacaactcacccctgccggcccatcccgcgctccacgctgcacatgatgctgtacggtatcatgcttttctatatccgccaaagaccgcttactccctcctccgggaaaacagttcgccgcaaagccatccatcccccgaagggagaataa

SEQ ID NO: 192028 - DNA, 288 bp, Arabidopsis thaliana landsberg
atgacgaaaatccttgaggccgagggaggggtagaggccgcatgccggctcgctctcccccaccatcaagccggagtcaccatcttgggtgaccgccggtggaggggtgcggccgggctgcatgatgaaaatccttgaagccgaacgatggctgaaaggtaccaactcccacggagttgcgtccctccagcgaggtcgcggaaagacggcggataccccccatccgggggcttggaagatggaaagacacgacgcataagggaggaagaagacatggttgccttctga

SEQ ID NO: 192029 - DNA, 346 bp, Arabidopsis thaliana landsberg
  unsure (1)..(346): unsure at all n locations
atggtgaatcactgggactccacgagagatctaaaacacgaagttatactgctttggttcacaccctacttcaatgtacgtgttacaacaggtgtgtttgtgtgaagaagannnnnnnnnnnnnnnnnnnnnnnnnnnnnnnnnnntcttatagagatgacttgttctctactggtatgaggggcaatctgttgccccggtttgacgtagtgctcctgatgcggtccgtagtgtcgtgcgtagctgtactcccggtatggcgtactgtctcgctcattcgtcatacaggtccctgtagcgagtccaccgctgacatcttcatagtagtgtgcggtggatcccgtgg

SEQ ID NO: 192030 - DNA, 288 bp, Arabidopsis thaliana landsberg
atgaatgacgaagaaggtagattgtatgattggtggtggccatttccgaaaggagggagaaaggtaataataaccattttgctaaatttggttttgtgtatgtgagaaagacaacgagtttattaggaggcgtgtgttgttcttcagctgaaaattgctattttaggagacgttcgtgaggatcaagttagctttggtgaagaactctttccaatttcaacttacgtatgtgtccttttgattactgaattgttgtctggttttgcagaaataagaataacaaccaag

SEQ ID NO: 192031 - DNA, 451 bp, Arabidopsis thaliana landsberg
atggtctgcgtaaatctgagcaccccaatgaccgttctgttgctgaacaactcctttgaatttcgtcgtgttggacaaggcaggttttgtggtggtcgtaaccttagtaggtttcatgcgtttcgtgaggctcaagacagagtcagttaagcctgaagtctctgtcgttgtcttggctacattgctcatctcgtccatatccataacaaaaaaatacaaaaatcaggataaggacataaaaacatgaaacagaggacgagagtgagatgttcgcagggaacaaggcaaatgaaaacagaagaaattaggaagagtatttgaaggagagatttgagggagtaaatcctggaaaatcagtattatgtttctctgttggttttgttaacaatgaatcttttagaatgttacagtttccatgttttgttttgtttttctagttttctctcggtga

SEQ ID NO: 192032 - DNA, 836 bp, Arabidopsis thaliana landsberg
atggctagagttttaggtgtgcttctgtgtttactcgcactgttcagctcgagcttatgtttggatcatgccaatggtcgtggagatcaagcacttgctcaaattaatgtttacgaaacaagtcttgctttagatagttctgtcaaacttcacgcttcccctcaagttcttggttcccaggttccaataacaaattctttcatcatattattgttcttgtcagattcttgtttgacagatatatattaactcttaagagatggtttttttaaatgtcaaaaaaattgtatgatagacttgaatatgttttcttgatttcacgtaattattacaaaaaccaaacttaaatagatatgttattgatgtcatgactttgatcttacagggtgaagatacagaatgggtaaatcttgctatctccaaccccaagcccacttcagatgattggataggagttttctctccagcaaaattcgagtattttttctaatctgcatctgtgtttgttaacttgtgaacgtgccatttgtgcattattaacttgtctttgttgtttgttagttcgggtaactgttggccaacaagtggtggcaaagagaaaactccttacatatgctcttctcccatcaaggtttggtttattacatatttaccagtgatttttttttttttttaagtcccggtgtaacattccccttttaatttctatttggcagtacatgtattgtaattctcatccagattacatgaaattcgggaatgtgactcttcaattccagattataaaatacagagctgatgtctcctttgcactgttttccaatggagttcaagag

SEQ ID NO: 192033 - DNA, 23 bp, Arabidopsis thaliana landsberg
gaagtactcgatttaaagtttag

SEQ ID NO: 192034 - DNA, 182 bp, Arabidopsis thaliana landsberg
gactagtaatatgtagatattttgacggatccggatatccggatgtaattttttttgttatccggctccggatccgggtccgtatgatccataaatttgttatccgtattcagatccgtttagtccggatatccgatttttcggagcggatcacggatccggatccggatattcgcggttag

SEQ ID NO: 192035 - DNA, 113 bp, Arabidopsis thaliana landsberg
atgcaagagattggtgatctcgatagcgctaaaatatctgagaccaatgccgcttttggatccggtccgggtcggatcttacccatcgcaacaaaagtttcaggacaatggag

SEQ ID NO: 192036 - DNA, 87 bp, Arabidopsis thaliana landsberg
gtttggcaagccggctggaaacaggaaaggatgaacgtccgctgctgcataataaacatggcgatgaacttataacttttattgccg

SEQ ID NO: 192037 - DNA, 383 bp, Arabidopsis thaliana landsberg
atgggttgtctccgccttgtcgtcggggatgccgacgaggatcaatggcgcgccgacatgcgtctcgtagtgtccttccatcgccgcgatcttggcaggctgatgctcgagggtgttgagcccgtgctggtcgcccacgaagatctgcaccggcgtcaccagcgctgccatccacatggccatcgagaacatcgttctggcctggcgattgctgctgtcgcgcaacagatgataggcgcccaccgcgccgaccgcgaacgcggtggtgaggaatgccgcgagcactgtgtgcaggagacgataggggaagctggggttgaagataattgcccaccagtcgagcggaatgaactgtccggcctcgtttgtgccgtagcccgctg

SEQ ID NO: 192038 - DNA, 74 bp, Arabidopsis thaliana landsberg
ttgttatcttgcagaaagccgtccttttctaatgagagaaagaaagggaaaggacccatatggcagtggaaatg

SEQ ID NO: 192039 - DNA, 142 bp, Arabidopsis thaliana landsberg
cctttcgcccccacaagccttcgccgtcaaccgtctcagccatagcgcggcgcaagatccagccactgctcgaaatcggcgttcctcggccccattcgcctcgtggaagctccgggtggtcgcggaagctgtagcgggcgtg

SEQ ID NO: 192040 - DNA, 546 bp, Arabidopsis thaliana landsberg
gaggaaattcaaacgagaagtaggaacagagaagagattcgaagagtgcatgactgctataagcgtcttaaatcttgtgttgctcagaaagatggtggcggccgctctgcgaatcttgagcaagcgtatcgctccctcatctccgcttccagaggtttattttctctcattcttagctcgatttagttctatcaattggatgattgagaatctgccattttccggagttgattgagctcattttttttttttttcctgaaattgagttttgtggttttagataactttgtatgagaaagaatacttcttaactgaattaagtgaatattagggttacagattcattagctctagcattatgattctaatctttggacacctcctagagtaatttttgttaaaagaatagaagccttagattgaagtttgttggagtaatgatttagttagttgcttatacttgcaggttgtactagcgttaagcgccttgtggctgatctcgttcctcgatatgcattgtactgtcctacggctattggagatgca

SEQ ID NO: 192041 - DNA, 166 bp, Arabidopsis thaliana landsberg
aaaggggttggaggataaaagggagatgatggactcctttgtaaaccaaccaggatcttttggatttttgaagagctcacatcgccatcacgcgtttttccgaaagatgcttactgaataccgttctaggaatcaacaaaatggagctaatcagggatatgattag

SEQ ID NO: 192042 - DNA, 419 bp, Arabidopsis thaliana landsberg
aaaagaaagatactctgaatcttcttgtctgcctaagagcagaaatgttgggttccagtacaagatcaatgttttttcttctcgtctgcataggattactagcagacaacagatataatgtctcagccatgagacatagagagtttttcctcaaagaaacacaagcagaaaaagcaggagttcagacagaggaaatttctaagctcaggagcatcggtgttcaattcatacacacccttgaagatcaagaaatgctcattaaaaaccgacgcgttctcgaggaagttaacaaagataaaatcaaagctgaggagacacaagaacgaaagaataagacagaagactcattcaaatcaagcaagagacgtgtaagacgaggatcagatcctatccacaacaaagctcagccattttcttaa

SEQ ID NO: 192043 - DNA, 136 bp, Arabidopsis thaliana landsberg
atggctgggaataaagcaaacgacgaagtcccgacaaagcaacatacccaggatactggtccagagaaggagaagcgggtactcagagtttccccgtggagaaaacgctctccgacaaaggcaacggaggagctgg

SEQ ID NO: 192044 - DNA, 447 bp, Arabidopsis thaliana landsberg
gacacggcggacaagctcgacgacgtcgtcgacgcggccaagccgttcctccacgaggcccggccggtcattcgggacctgaagccgttcacccacgatctggaggacgcgctgccgccgttgcaccgggccacgaagcacctggacccgatcaccaacgcgctgctgccctacctgccggacactgcggcgttcgccattcagacccggtcgctgctgagcatggaggacgccaacggcggcatcctgcgtagtgcgctgtacatgtcgacgacctcggcgccgacgatcaccgggctgccgaacaatggcttgaagccgattccggtcccggcgatcgacaacggcaccgctgcgctgcagcaggcagttccggctccgttcggtgaacaacaagcgccaccgcagaacgggacctacccgcggcacgccgagcgtcagtaccag

SEQ ID NO: 192045 - DNA, 282 bp, Arabidopsis thaliana landsberg
ccgaaagaagtggagcttatcttaaaacttgatgacacatttgaagggattgcagagtttttttactatgaagatactagggtaaacccctcttatatcagttctatccggtttaacgcgctaaaacagcattttgcagaagtggacaccatccacaaaacagtcttttaccatgactgcgatattttatttaccaccttcccggaatacctgcatgaaatgattgaaggacacaattggtatgtgaccgataccaggcattacctcggatataactatgta

SEQ ID NO: 192046 - DNA, 745 bp, Arabidopsis thaliana landsberg
atggcgtcgatgcttatcagggaaggaatggttaaggaagttgaattgttgcttatggagatggagagacatggagacacaatggttaacgaggggattttctgtgatttgattggtaaatatgttgatgatttcgattccaggaaagcagttatgctgtttgattggatgaggcgtaagggtttagtacctctaacttcgtgttatcagattctaattgatcaattggttagagttcatagaacagaatcagcttatagaatttgtttggattgggtggagacaagggctgaattaaatcacatgaacatagatagcatcgggaaagttatagagttgctttgtttggaccagaaggttcaggaggctagagttctggcaagaaagcttgtggctttaggttgtatcctgaatagctcaatatatagtaagattactataggatacaacgagaagcaagactttgaggatttgttgagtttcattggtgaagttaaatatgaacctgatgtgtttgttggcaataggattctgcattctctctgcaggaggtttggctcagagagagcttatgtatatatggaggaactcgaacacttgggttttaaacaagatgaagttacctttggtatcttgattggttggtgttgctatgaaggagatattaaaagagcggttctttatttatctgagattatgtcaaagggttataaacccgatgtgtatagttataatgctatcctaa

SEQ ID NO: 192047 - DNA, 170 bp, Arabidopsis thaliana landsberg
ttcaagcagagtttcaacgcatgttcgattacttccgaaatcaaacgttgccttatctcatgattcggaacacgttccttgtcaaaacattgctgaagcaagcagcatccgttttgatcaatcgctatctggtaacagtgttgagagacaacttcaagaagacgctgtaa

SEQ ID NO: 192048 - DNA, 358 bp, Arabidopsis thaliana landsberg
atgctggcgggcatccccaaggcaccgtcgcgcttcaacccgatcgccaacttcaagcgagcgaaagaacgccaggcctacgtactggggcgcatgaaagcgctgggctacctgaccgacgccgaatacaagaaggccatggtgcagcccatcgtcatcaagtccgcggcaggcacgccttcgggctcgtatgccgtccatggcgactacccggccgaactggcacgccggctgctctataacgtctaccaggacaacatctattcgcgtggtttcaacatctacaccacgatcaactcgaaagaacaggaaacggcctaccatgcggtgcgggacggcatcctggactacacgcgcc

SEQ ID NO: 192049 - DNA, 125 bp, Arabidopsis thaliana landsberg
atgaagagatgttttgaaagcttaatagagagaagcgtgatgaagacgtgggctctgtttcacgaatggagagagagaacacgagaaccacggaacaaaacgaagaaaattgcaaatggaataag

SEQ ID NO: 192050 - DNA, 555 bp, Arabidopsis thaliana landsberg
gcgacgccgctgctggaccagaatgccaccgaaaacaccccgttcagctacgtggtgccggccatcagtttcaccgatccggataacgacagcctgagctacaccgccaagctcgccgatggcagcgccctgcccaactggctgaccttcgatgccgccacccgcaccttcagcggcactccacccgacaccgtgtcgggcacctacgccatccaggtcaccgcaacagacggcagcaacgccatcgtcagcgacagctttaccctcgcggtgcaggacgtccccaccgccattgtgatcaatggcacgccgaacaacgacacgctgaccggcaccacagccaacgagcaactgttcggtggcgcgggcaacgacaccctcgatggcggcgccggcaacgacatcttggtcggcggcaccggggtggacaagctcaccggcggcgccggggccgatgtgttccgctacaccttcaagctcgacagctaccgcaccagttccaccagcgccagcgaccagatcctcgacttcgacgtggccgcggacaagatcgac

SEQ ID NO: 192051 - DNA, 1339 bp, Arabidopsis thaliana landsberg
atggggaattccgaaatcaacctggaatccgtttgtgatggtgagaattagttcacctattcattatcaatttattcagtttacaagtttgtgttaaaaatgaggaaggaagtctgtgttgttgttgttgagtaaaggattttaaactagcaagtcagaatttctacattcactaacaagcactaagattagtggaatctagagatatatttaaccacttggcggagttgtggtttatacactaacaaagatgaagactttcctgaaaatgcttccttggcaatgagatcttgcaaatattctctgactaaaaatatcaactgtggattagttatacgcaagtagtgatacatctgatgaatttactgaacttctaagttgtggcttttgtctctaagctgtattgttctgttttgcttccgaaggaaacttgcacaaggtgctagtagaactagacggaattggaggtggtgggaaagttcaactggaggtcagtttgtgctgtcaaagttttttcctgtattattgttctgttgacggatagaatcaacttaacttccaaaaatacaatatatatacctttacatccaaagaagcacaagatatcatgcagccttgatcctccatagattcacatgtttgatatgctaaagtaaaaaattagtctctttactagtttggtctttgtcttaaccgtatttaaaccttcagattaagtacaaagggtttggggaagttgaagaagaaaagaagtggtggaggttcccatttgtttcagaattccttcagagaaatgaaattaagtcagttctgaagaattttgttgactctgaagcagttgagtcagttttgaaaaatcttgttgactctgaagctgtgccagcacgtcaatttgtagagtatgcctttggacagttaaagtcactcaatgacgctcctcttaagaatactgaacttttaaacaatactgctgaggactctgaaggagcaagttcagaggattcgtcagatcaacatcgcagtactaatctgagtagttcaggaaagcttagcaaagacaaagatggtgatggcgatggtcacggcaatgaactggaggatgataatgaaagtggcagcattcagtcagaaagtaatttctgggataacatccctgacatagttggtcaaaatatcgtccagaaacttggccttacttcacctgagaaattgaagtggaatggaacggaactacttgaaaaatttggtctacaatcgcgaaaaactgcagaagccggttacattgaatcagggcttgccactgctgatactcgagaagcagatgatgaaaaggaagatg

SEQ ID NO: 192052 - DNA, 524 bp, Arabidopsis thaliana landsberg
  unsure (1)..(524): unsure at all n locations
atgcggtttcagccaaatagacctgctacgaaagcacaagcagctgtagcattaacaagcggtaaaatggtgaaagctatcacagcagagctatcaaggttagaagcagnnnnnnnnnnnnnnnnnnnngagacagaagaaatcagatcggaattgctagaaaaaggcgagataaggcaattttgggatgagaagattcaggcagagagatcccgaggatttgagatggaagagctgtatctctctagagttaatgaagtagaagaagaaaaaaccactcaggagaagtggtctgcggagcgtttgaaagagaaagcagccatagactgtcagaaacagttgcttaatagcttgactgaggagattgatgagatgtctcagaggctaatatctgataaatctgtttatctgactgaacacagcaagttacaagagatgctaagtgacttacaatcaaaacttgaatcgcttatcgacaaaagatctatcctcgaagctgaagtcgaagctcttcggatactaag

SEQ ID NO: 192053 - DNA, 241 bp, Arabidopsis thaliana landsberg
atgagaggaaggtatttccgggatctgtccattgtgagggcggacgaaggggaaaaaacttgtccacaccctgaagaaaatgaagttgtggtgtaccgaagctttttgaaagctggattgcgattccccttgagcagcttcgtcgtggaggtgttgaaaatcttcgaagtctatcttcatcaacttactcccgaggcaattataaggttaaacatcttcgtgtgggccgcgaggagccaag

SEQ ID NO: 192054 - DNA, 114 bp, Arabidopsis thaliana landsberg
atgggtattcctcggcaacgatgcagagactttgaggaacgtggtttctgcctcagaggggacatgtgtccaatggagcatggaatgaatcgtattgttgttgacgatgttcag

SEQ ID NO: 192055 - DNA, 546 bp, Arabidopsis thaliana landsberg
gtgtgcgagtcgatgatgtcgatgctgtgcatggcgtcatcatcggcctgcggatcgggtatggtctagcagcgtttctcgttactggatgcggaagtcagcacaatggccaaggcgcgaaaatctccggttcgaccggcttccgatggcacgggtcgtggcgtcgtcgaccaggttggcggtatcgattcccacccgccgatgctggtgccagccagcgaactggaagcgctgctggacgcattgccggacgtggtgttcttcatcaaggacaccgccggccgctacacccacgccaacctcaccctggtgcgccggctcggcctgaaacggcgcgacgaagtgatcggacgcagcgtaaccgagctgttcacggcggcactgggcagtgcctacgcgcggcaggaccagcgcgtgctgctgggcgaaacggtggaaaaccagcttgagatgcacatcttccccaaccgcgcgcccggttggtgcctgacctgcaagcgttcgctgcgcgagcacgacgaaaatcccggcgtgctgggcatctag

SEQ ID NO: 192056 - DNA, 109 bp, Arabidopsis thaliana landsberg
gacccagcaatgcccatcgttcttcctgtttgacctgccagttcacaccgtccagacagtttttgaggcctatttgatcaggacatcttccatacccacgatctggttg

SEQ ID NO: 192057 - DNA, 178 bp, Arabidopsis thaliana landsberg
gtggcgtcaagcatattcagagagcattcacccaaatggtgatatggaatattgggagattccagaaactattagtgaagttatttgtctcccaccttctactcgtgtacctagtggcagacggaagaaaaagaggataccttctgtttgggagcatggaaggtcttcagtaggtgtg

SEQ ID NO: 192058 - DNA, 102 bp, Arabidopsis thaliana landsberg
gcggttgacgacaacgtgttggatctagcacaacggcatgctgaatacagtattggttcagcttcctataaaacaccacaaaactttttaaatgacaaatga

SEQ ID NO: 192059 - DNA, 347 bp, Arabidopsis thaliana landsberg
accgtgaaacctgcctggcgccagcaaggcgcaaaggagcctgttttgacgattatccagtcccttgccgccatcacgccgggctcggcgcttgccgaagccatggagaaacgggcggagatcctgcgcctgagcgaggcggcccacgacgcggtgctgctcccccgcgatccgggtggcctgtcccatggcctgcgggccgctctcgccgccaggatggcccggcagaacggcaacgaggcccttgccggccactacgatgatctcgtgcagcgtgcggcggaaggctcgacggccctgctcgcgcagccccgcacgagcgtggacgacgagcgcatcgcacgatc

SEQ ID NO: 192060 - DNA, 257 bp, Arabidopsis thaliana landsberg
cggggagggctctcttctggcttctggatccgcagactgcacagtgaaactgtgggacgtcacttcaagtaccaaattgacaaaggccgaggaaaagtgagtttgctctttcaagttgtattgttgttccctttgaatggtagattgttttgttaaaaacgatttatcatttgtgattgatcaggaatggaaactcgaacagattgcgctcactcaggactttccccaccaagtccacaccagttcacgctctccgg

SEQ ID NO: 192061 - DNA, 623 bp, Arabidopsis thaliana landsberg
atggacgtcgttgagagaaaaagaccaagaggagcgtttctaaatctgtttgattggcatggaaaatccaggaagaagcttttctcttccaatctctcccaactctctggtatgtcttccagcttttgttgtatatataagttaaggtaatgaagtttaataatctaaagtttcttcttttaaaacagaagaatctaagcaagcaaaagagaatgttcaaaacccctctattacgccgcattctgttgtaagccttttcttactcaacaccattttccttgtttgatgcaatgttttgttttgtgttagtttactgaatgacatgaactatttgtgttctttggtgtgatctgtttacaacagtttgaagttgatcagagtgtaaagaacccaacttacaacccgagaagtgactctagctgttgtgcttcatctgttactagtgatgatggaaatgtggttagagcaagtgtggtagcgaggcttatgggtttagagggtttaccactaccaaacgttttggaaccacgggttaatcctgatcttgatccatactttctcagatcctcgcgccaagcaaacacttgggatgctaatgttgatcgtcagagtgacttcgatgg

SEQ ID NO: 192062 - DNA, 78 bp, Arabidopsis thaliana landsberg
attcatcacatgtcggttctttcttctcggacaggacgagatcgtcaaacgtaccgacacacttccgtctcgtttctg

SEQ ID NO: 192063 - DNA, 106 bp, Arabidopsis thaliana landsberg
agttaaatctgatgacatgatttacatatatttttatgtgtttcttcgaagatcacatttttatgtacaagtttgcgactttttcggattggaatacgtagtattg

SEQ ID NO: 192064 - DNA, 107 bp, Arabidopsis thaliana landsberg
atgaaatcacggcgacagaatgtgtccgtggctcgacaaaccatccttggacgcgacgaaaactttgaaccaatcccaattgatctcgttatcgagatattctcaag

SEQ ID NO: 192065 - DNA, 1098 bp, Arabidopsis thaliana landsberg
atgccagcggaattattggctaaaatcgttagtttagtttcggaaaacggtgtagaagacttgaaaagttggattcgaagtggtcatgcaggcaaggatgctgtcttgtcgaaagagacactgaagcgtgtgggacttgacaaatcgtaacattttatttggtggttcatgcctcactcaacgtaccacaaattttacaaaaaatgcctaaccgaaggtaaccctgccgccgtctttaccgaaatgagtaagggatgggcttacgaggaattgatgacacaatgcttccgactagggagatgggtttccttcaagagaggcttatcagcgtatatggagttcatagatggtcgactttgtatagaagatccacttattggcgagctagttacaaacccaccattgaagagagctggcaggccaaaatgtcctatttgcaagaaaaacggacatatgtgtccagtgaggtttggttaggtgtttgtgttagacatcgtctaaaactagattattcaatttaagttggttttattaaaaacgttgtacaatggctaagacatcatcgaatgtttgaatctgttacaatctaaaaggcaaagtcattgacggctgtttttacaaatgtttcattgacaacaaagtaaaccatactgttgacatatattaatcttgaccatatagtaagctgggttttataaaaataacatccatagtaaccacctaatataactaaaatgaaacagaataattacaaaaacaaggagtcatggttattatccataaaacagtaatattaattacaggtatcaataagttacatatataaatataagtgagaaacccatcattgtgcaaaagggagagtacagggaagaaagaaaatatagtgatagacgttctatacgttctaacaggaaacgagtgtacggccaagagttgttacaatgggaaagaaggttggttcaaaacataactcaaaccttgatttattaataatgcgataattgcttcatgctaggtttaaactcttacatatttgcactgcagaaacggatggggaatattgtagatataaaccaagatgttttggataaaatc

SEQ ID NO: 192066 - DNA, 1076 bp, Arabidopsis thaliana landsberg
atggctacaacttcacacaacaaaccctcactcttccctctactctcccttctctgtttcatctccattttcctcctcctctctctatccaaacgcgcttccctctcctctcccaaaactcaccgctccgccaccgtcttccctccaaaacccgacggttccctctcacctctctccgccacttgcgacttctccgaaggctcctggatctacgaccccaaccccagatccaccaggtacaccagtagttgtaaagaaatcttcaaaggatggaattgtattcgtaacaacaaaaccaatggtttcgagatatctaattggcgatggaaacctaaacactgtgatcttccttcgtttgatccactcaaatttcttcagtctcatcgcaataccaacatcggtacgcctttagctctcaaaatcattgcctccttgaagcaattactagttcttgttgtttagaattagatgtgatattcatggagtgtgattttgttgataggtgttagttttgtacatcttaagagttttgttgaacagtgcaggatttgtgggtgattcattgaataggaacatgtttgtatctttattctgtatgttaaagagtgtgacgggtgaattgaagaagtggcgacctgccggtgcagatcgcggattcacgttttcgcagtataatttgactatcgcgtatcatcgaacaaatctattggctcgttatggtaggtaagctgagttctctttggtgttcttgtatcagagattcgtatttgtagttgcttctctggcttttatatcttgctcctcgtttgatctttaaatagtattctccatcagtaagtttcttgttagcatgcttatttgtcattttctcaactgtgtggttatgcatagtgtaggaatagcatggttttatatggttttaagacgttttctcttgctgacggtttagatggtcagccaatgctaagggtggtgagttagaatctcttggatttaaagagggctatagagttgatgttgatattccagacagctcgtgggcaaaggcttcgagtttccatgacattctcatttga

SEQ ID NO: 192067 - DNA, 209 bp, Arabidopsis thaliana landsberg
tcttccttcagatgtttgaagatggcataaaggagcagaccgagcataaaataaagtcaaaatgggccttgaatcgtcactatctattgtcccctatcaatggatctcttaaatatcaccggttaggaaatcaggagagaaataatccggagattccatttgaaagggcatcagttatccttaatgatgttaacgtgactatcacagag

SEQ ID NO: 192068 - DNA, 159 bp, Arabidopsis thaliana landsberg
tgatccgcgtcacgtctaaagcagccaatcaggttagttttctttagcgcccaagttttttagcttccttcacaattttttagtttttttatttaggcgcgtcttttaaacctgttcgctaaattttggaacctgacagtgaaggcctctatgaaataa

SEQ ID NO: 192069 - DNA, 722 bp, Arabidopsis thaliana landsberg
tttttgagtatgcagaggttataactcttggtccattgcttacatctcatccgggatatctgaggaggataaagatagcaagagaggtcgcaaatgctttgacttaccttcacacagcattctcaagagttttcatccattcgaatctagatcctttcaccattttcttagatggaaatggggtcgcaaagctcgggaatttctgcaactgtatcacaattccagaaggagagacatttgttcatgatgatacattacagaaataccatgagttgaggcataatacattaaaggggacacatgggcttggtgtatgtaacttaccggtcattgatcccgactacaaatcaaccggtaaagtcacgacaaagactgatatgcacagctttggaggattcatgctagctcttgtgcagataagggaagttgatgatgagctatctctatcttcggatatgctgagagcattagctgacttgttcatcaaaccttatgatgatgttcgctatgttcacttcccgcttcaccatcatgtttctaagatactgaggaagtttgggtatgcagaggttgtagattcagatatgagcgaggtagctgcttggccaattaaagcctttcttagattagcgttgagatgcattggatgcaagttgggagactcgttgagtagcatgattcaagtgacgaaagagctcaggctgattgagaaatctgcataa

SEQ ID NO: 192070 - DNA, 173 bp, Arabidopsis thaliana landsberg
aactcatacatcgactagcgaccagcgacatcatacattgttcgtttgtctgtcgctgtattcagcgacctattacagcgacaatcgctaaaaactgtcgatgtgttgttcgtttgactgtcgctataaatagtcgctatatttttaaaatatttaattatttttcgtgctaa

SEQ ID NO: 192071 - DNA, 202 bp, Arabidopsis thaliana landsberg
atgatcggttctggttacgctaaagagtgtttaagcatctataaaagtatcaggaaatcgatcatcgacgaagggatttatcgtttagaagtggagaagacgagtactgggaaggtgaagaaaatgtcatgggaagttatggagttgaagatcagaatctgggtaaaagcagacaaagtttctgtggagactcttttcaaag

SEQ ID NO: 192072 - DNA, 562 bp, Arabidopsis thaliana landsberg
acaaccggacagtgcagtagtcctttcttgcttagactgtttcctcaagaacggctcactctactgcttcgaatatggagtcagtcaatcggttttcctaaccaaagtccgcggagggacttgcacaaccgcgcaatctgatacaactgattcagtcatccacagggcaatgtaccttctccaaaacggatttggcaactacgacattttcaagaacaactgtgaggatttcgcgctctattgcaagaccggtttgcttataatggataagctcggtgtagggagaagcggtcaagcttcttcaattgttggtgctcctttggctgcactcctctcttctcctttcaaattgcttattccaagtcccattggtgtggcaacagttactgctggtatgtactgtatgagtcgctatgctaccgatattggtgttagaagcgacgtcattaaggtctcagttgaggatttggctctcaaccttgacgtaaagaccattgagcaaggtgaagaagaagaagaagaagacgaagaagaagattctgataccgactatgttaggtga

SEQ ID NO: 192073 - DNA, 824 bp, Arabidopsis thaliana landsberg
aagtgtctcgtggcgctgatgggttctgtctttctcaacaaaaatatgcattggacatcataaatgaggccggtttgcttggttataaaccttctgcggtacctatggagcttcatcacaaactcggctccatatcaagtccggtctttgataatcccgcgcaatatagacgcctagttgaccggtttatatatctcaccataacacgaccggatctcagctacgcagttcatattctatctcaatttatgcaaactccgttagaggctcattggcatgcggcacttcgtcttgtgcgttatctcaaggggtctcctgatcaaggaattttaccccgttctgacagtgctttgtctcttacggcctattgtgactctgactacaatgcctgccctcagactcgttgttctctctctgcatatgttctctatttgggcgactctccaatatcgtggaagaccaagaaacaagacacggtttcctcttcctcggccgaagctgaatatcgtgcaatggcctacacactcaaagaaataaaatggttgaaggctcttatgacaactcttggtgttgatcatacacaaccaattctgttattttgcgatagtcaagcgaccattcacatcgctgctaaccccgtctttcacgaacgcactaaacacattgagaaggattgccaccaagttcgtgatgcggtcacagacaaggtcatttctactcctcatatttctactactgatcttctcaccaaagctcttccaagaccaactttcgaacgtttattgtccacgttaggtacttgtaattacgacttaccaacgtga

SEQ ID NO: 192074 - DNA, 333 bp, Arabidopsis thaliana landsberg
gctgtgaagactccatctagttttggtgggaatgaactgaccagattcagtgatcctcctggggatgcttctttgcatgatttatttcatccactggataaagttcctgagggaaaaacaaatgaagcctcaacatcgacgcctactgcaaatgtaaatcagggtgattctcctgttgcagatggtggaaagaatgatctggcaacgaaattgagggctagaattgctcagaagcaaatggagggtgaaacggggcactcacaagatggtggtgatcttttccgcttaatgatgggtgttttgaaagatgatgtccttaacatcgatgacttg

SEQ ID NO: 192075 - DNA, 2022 bp, Arabidopsis thaliana landsberg
atggatcggtgtggtggttgggtctacggcgcaaggaatcatactagctatagtcactgcttgcatgagttggaacgagcaggttaatatcaatctgaaatatttatgactctttgttttccgtactgatgttgcttacatcttgaatttgcaggctgccaaggcaagaaagagaatagttgtaagaacttcttcatttggcaatggacttgcttgaatggttctttatttccatttttgagacaagtcacattataattttttttcttcaattttgttataatcatcatcacagaatattggagtgaaaatgacatctatataaacaatatttctatttaacgaatgcatatttatcacctttttttcttttgtggaaagatgcatatttatcacttatgtaaataatattacttagcattggcttgtataaattaatataataaagttgtttataagaaaatattataaaattttaaatttaactagtatcttatatctgttttacctatctgttattaagagtcggattcgaaactcatgttaaagtaaatttaaaagagagaaaagtggttcaagttcatttactctatttttcaaaaaaaaaaaaaaattcttcctctttcatgtagataaacaaatataattaataaaattatttattttattctcatttacttttttttttttgcctttccttctaattactactatacgtttactctaattttattctcaaaatttaccaatcatacccaataagtttaatattattttaaaattcattgtctaattaatgtttgatttgattaatcgacgaccacgagttccacgggttgtttttaaaattgatatatcatatattgaaaaagctatctagaagaagtacccatagaagaagactctcaaactgaccgacacaaatcgatactattgagtgttgagcaaatactagatccccaatttcgatacttttacgcctacttcttttgcatgcgtggataggaaacattaatttacatatattggtttgtcagaaaaatatagtaaattttttattaaaactaaagaaaagtgtttgaatatattatttaaccgccatattatgtaagataacaatgatacattgataccatatcgagttggtggatgtaactttgttttgcctatgcaaataattttgataccaaggtagcctaaactgtcaataaatcatataacttctacaacatgttagcatgattgtcaatgttgttattatgatgctaattatgttagcatatagattaatacatgatcacaatgttttctctctgcacactgcgatcgatttttaatatggatttatccagtacaaattcgacaatagttgttatttcgcaaatagatgaattattgaagaaacatgagattatgttgcattaaacatatatgattttttgtgcaaaagctttgtttctattcaatcactcaaaactattacaagacttaggagaatacacattctcagtgtttgaaacgacaaagttaaaagcagtaaacgaaaaagtacgataatccaacgatagatccataattactttcatacaagagttgtagaacacaatgtcacatgccagaaaatggtaagtcggagacagtaccacgaaagatctgagaagtggtagattggtcatagtccattaacataatgacgttgaaaatgactttgtagcctcgagtctcgcagacacaagatactcttcacaatacgatagcaaggcaattgggaaaatcaagcgatttctcggcttaaaaaccggaaaccaaatacggacactcgttataaaagttctctccataaaggaggaaagtgagataaatgttctctctataaaaaaggagactgagatatatgttctcttcataaaggaggtggaaccaaagttttctttgggaagtttgcacaccgtggaccctcaaaatcatgcaagattacacggtgacaatattgaaattgtcgaccctcgcacggtcttctga

SEQ ID NO: 192076 - DNA, 34 bp, Arabidopsis thaliana landsberg
gaccattttcgacgactttgattgtaagcggtga

SEQ ID NO: 192077 - DNA, 760 bp, Arabidopsis thaliana landsberg
aaacagagactgcggaatgataatcacagtgtgacccacgatgaaggttcgcgaaaccaaaagcaaaatggaagtaggcataaggatcatgttggcttaagccctttcaaaaaggaatccacgagtcagactgcctccaactcaatcaaagaggctacagacttgaaacacatggctgatcgtcttaaggtttggacatttttatggaaaatgttgcagtggttacgcatgttgtctcttccttggcttaacattgacagtaaccttttgcagaatgctgtgtccaatcacgagagcacaggtgtttactttcaggcagcgcttaagtttcttcatggtgcctcccttttggagtcatctggcacgaccattgccagatccaaggatatttacggcagcacagccaaactttgcgagtaagtttggcattcaacatgatctaaatttgtgacttttttctactcgatttgttgtgcacctctagggagtgagatagctgaattcttctgatagtcaacgcaattaagtcccccaatttactatttagagggagcctttcactgtgatggtacttgttcatgttgccctctcattttagctcagctgctgcattgtggccaatagatatttctagcatgttaagatgttctagtgaaccctgtcctgatgttacgaaatttttactgtttatgtaacaggttctgtgctcatgaatacgagaaaaataaagatatgggggctgctgctctggcttataaat

SEQ ID NO: 192078 - DNA, 144 bp, Arabidopsis thaliana landsberg
gtcaagctctcttgtcatggaagtctcaactgaacatctccggcgacgctttttcctcctggcacgtcgccgacacatctccctgcaattgggtcggcgtaaaatgtaaccgtagaggtgaagtttcggagatacagctcaaag

SEQ ID NO: 192079 - DNA, 133 bp, Arabidopsis thaliana landsberg
cttcctgttgttgttgttcttgatccctaatatgcatcctctgaaattcctgcatttgtctttgaatttccatcggatttacgacgtgatccggttgaatcacacgcggatcgttaaacaaaggcggttctaa

SEQ ID NO: 192080 - DNA, 238 bp, Arabidopsis thaliana landsberg
gcatccagtgagcagccattctgatacgaccaacattcccggcgtttgggagtggaactccggcggatacgaatttagacttggaagaagagagaagcgaagggtacacggcggctatgccacagctcataagcgagttcgacgccatcgtttctctctatctgtcgttgtgtttgccaccaaaggagaaagatgtggacgagaggtgtttggtggaagtgtgaatgtgggagactga

SEQ ID NO: 192081 - DNA, 735 bp, Arabidopsis thaliana landsberg
tggcattcaaatcgggagtctggtatcaatcatgctctgtcaatctcggtcgattctgctccgtcaaacgtcgacacttcctcaggttggtattgttgtggatcgacacccaggtggtgtcggtcaacactatcaatgtgtgtcgagcgactctagagatcagtgtcgagcctgctcgattttgcttcgtcacagcctaatggctcatatatatgcactggtgtcgatcgacaccaagggttggtatcgttcgacactgcctctgcaactcaaaaatcgtcactcccctcaatcttttctaactcatactcactttccattgaaacagcatcccaagaagtgctgaggctgctctcattccatctaggggtaggtctctctaagatccactgttgaccatccagaatctgttccagcaatgattatatcttgcttctaggtgcgggtggagggtgggggttggtaagaagcaagatcatagttctttgtgaagctgaaactattgctattctgaagcggttgttggaactgagaattctgagtgtagctagttggaccattcccataggaacctctatagccttgttggtgatcaaatctctgattcggaaaacctctgctacgaacataatcgacatcctccacaagtttattgtgaccacattaagcttagccatgatcccaccaatcttactctctctcatgtttctcgcttgctcctggttctgtgattag

SEQ ID NO: 192082 - DNA, 87 bp, Arabidopsis thaliana landsberg
aggctttcaacagttagtataccaatcggatacgaggtaagccaacagcccaacacggcaacacgtacccttattactttggcttag

SEQ ID NO: 192083 - DNA, 2919 bp, Arabidopsis thaliana landsberg
atggataggattagcaatctaccaaatgagatcatttgccacattgtatctttcctttcggcaaaggaagctgctttcgcattgattctgtcaaagaggtggcagaatctctttaccattgtaataaaacttcagtttgatgactcagtcaagaatgaagggagtttgaaggattttgtcgatggagtattggctctgcctaccagttctcgtgtaaggagttgctctctagaatgtcgaagagagtttgatccgactcattatgatgatttcaatcgttgtatatgtgctttgctgaagcgtggtatcttggatcttaaactagacatatgtgctgggagacgatattcactaccacttgaggttttcacttgcaaaacactcgttaagctggaacttgggagtgattttggtggctttgttgttgatcttgtccctgaggatgcttttctaccagcgcttgagaccctccttcttaactatattcggtttaaagatctccgccgttgtgcgtttgaaaagcttctttctgcttgccttgtgctcaaggaactagtcatacataatatggagtgggaacgttggaaatggtctggcaacatatccagtccaacccttgaaagacttactattagtcatgtagatctctatgagtgtgagtttacgagaataaatttagatactccgaatcttacctatttagagttgtctgatgctgtaccggatgactatccaattgttaatcttgactcccttgttgaagttaagctcgatcttacgttgatggtagatcacaagtaccatggatatgtagatgacaacgacacgatttctagcaatccaacaaatctgattaatgggttaagaaatgttgaaatcatgaacttgcaatctcctaatacttttcaggttagtgtgctattgtttcttctttctctgtaacatgttattacagtttgagtttgattaaaacaaaaatatgaagaatcaaaatcgttttaacattcaggtgtgcatcttaggtttcttaagatgttccagttctcttgttacataaatgaaaatatatcctagaggtcgtcttcatccaaatatatacatataatgaatgactaattgatttattttgtttcaggcattttcttacttccatgaagcaataccggtgtttaaaaacctttatcatttaactatcacaaataatgatactgtaattgggttctgttgggaatttctaccatttgtgataaagaagtgtccaaatctaaagactcttgtcatcgatgtacgatcaatacccaaaagtttattgtacaaatgcaataaaaccttgtagatactccttgattttcagtttctaatattttctcttgctgagttgcttcagggtccattgcactacaatgaagaccgacccaaatctgtttgccactgtttgtcgggatattctttcttattgtcatgtcctttagaggtcttacagataaccgactatagtggaactcctggagaggtggagcaattgaagcattttctagagaaactgtccggtctcaagttggtgaaacttcattctcttacaagatttggtagcgacaagaaaaagttattaatgcttcccagagcttcctctaagtgcaagatcaaggtcacgttttcttaaaagctttgatcctcctagttgcaatctatctgttgtatcattttggatagtgaacactcttactcacttatatcctctgtttatcttttgtcggattctccttgttgtcctattttgaacttatcaactttctggagcctgttttgattcgcttttcatttgtaatttgctttgatagattcttaggaaactgtaaaatgaaactcagtatgtatattattaggcgtggataattctaaaagcctaaaattttcctttttggtttcttattacacaaggtacaagttctagagtgattgggaattgaattttgctctgtagtaaagtatgtgtcagggttttataatctcttttgcaacttatttttgcttcttgtccttataccttcggtttatgtcttctttttttgagacatatactgattctttttaaagcattatgattctctagagaatgctcttcttccatcgctcaagactctcattcttgattcagttaagttctatgatcgttgtggttgttgtgcattccaaaagcttctttctgcttgccctgtgcttgtggaatcagtgatgcgtaatctggaatgggaagattgggaatggtctggctgtgcgtccagtcaaacccttgagagacttactattgaccatagatattgggctgaacataacttggagagctttacttttgatactccgagtcttacctacttaaagtacattgattttgttccggaggagtatccagttgttaatcttgattccattgtcgaagccaagctccatcttattctcactgggaatcaagattaccctgtaagatacctaggccgagaagatgatcctattacaagcaatccaactaatttgatcaaggggttaagaaatgttgagatcttgcatttatctactgcaactgcgcaggtaattaagtgtgtttggtttcttctatttctccaatgcctaaataaaagaaagatgaaaaggagaatcaagcgtgcatctcaagttacataggatgttccagttacgtatatgacgaattgtttttgtgatgttttgtttcctataaattgcacttattttatttttatttgatttcagatgctttgtttcttcccccgtgcaccacttccagagtttgtaaaccgacatcatttaactattggtccaacttatcacgagtgttttaactggcgacttctgccaattttgctaacaaagactccgtatctaaagacgctcatgatcaag

SEQ ID NO: 192084 - DNA, 110 bp, Arabidopsis thaliana landsberg
gcgacatccagatcctgttcccgggtcaaagggaactttcaattggtatcggagctatgcctctccagtgtgggcttagccgtccggagataacgatgtcgtcacaagag

SEQ ID NO: 192085 - DNA, 646 bp, Arabidopsis thaliana landsberg
gaagacttcgccgatcaaccgtatcgtggagtcatccacatgataactgggggtccaacactgacttcgacaccaagtggcagaagcgggaccattaccgcagcatcaaccacgtcgccatcaccggtccagtcgtgcagacgaagtggtcccatgtaccgctaaccttcgacgcccgagacgtcgacctgcgcacgccccccacatcgacgccatggttatcaactgcagcgtggcaggctgggacctgcataaagttctagtcaacaatggcagtcaagcagacatcattttcctccatgccttcgaccgcatgggcataagccacagcctgctcaagccttcggacaacccattgtatggcttcggcggcatgggcacttttcctgtcggcaaaatagaattgcctctctccttcggtgtagcacccaatgcccgaagtgagcaaataacctttgatatcgtcgatatggtgtatccgtacaacgccatcatgggccgaggctccatcaacaagtttgaggcagccattcacggactgtacctgtgcatgaagataccaggtccgttagccgccatcacggtctacggcaatcagcagattgcgtgcaacatagagcgggacttcgtccctgggcaaagaaat

SEQ ID NO: 192086 - DNA, 76 bp, Arabidopsis thaliana landsberg
atggttatgaagaaggagcagcatggctttgggattgatatacacaacgccttcatgaccgttatgaagaacaaag

SEQ ID NO: 192087 - DNA, 167 bp, Arabidopsis thaliana landsberg
gaatggcgactaaggagacgcatggagtaaactgtgttaactattttgaaataacatttccagaagtatgtgaagcaaactggtgtgccgctgagtgtcttaaggcttacaagaatggaaaaggcacgtgttggcaaaagttctgccagtgcgtctatgattgttga

SEQ ID NO: 192088 - DNA, 72 bp, Arabidopsis thaliana landsberg
tcacgtcatggtcaacgcttcgacttaaatcggggatatttccataccacagaagatgagaacggtctttaa

SEQ ID NO: 192089 - DNA, 429 bp, Arabidopsis thaliana landsberg
atgtccacacaggccagagacgcctcgggcatcgcttgcatcacttccgccgccatccgcccgccagacagccgggtcacggtgccgcaggcgttgatgacggtcgggatgcccaaagtgtcgtaaatcaagaaaagtcttccttttgtgaacaaaaagaagtctttccatcccccttgcaacagtggagagtgaaaactccggcgtctccactctccactgttgcaaggtggatagaagttttttggttcttttttccaaaaaagaacacttccctcacgccgcccgcgccatctgcctgccccgcaacatatcagcgcatttctcgccgatcatgatgcaggcggcgttggtattgccggagaccagggtcggcatgatcgaggaaacggccacccgcagcccctcgatgccgtgcacccgcaactg

SEQ ID NO: 192090 - DNA, 119 bp, Arabidopsis thaliana landsberg
aaacgaagattaccaaacgagaaacaaagattgagcaaagttcttttttcgattctcgatactcaacagagaaactcgaaagaaatggtaaagtcaagcttcgtgtgactaatcgatga

SEQ ID NO: 192091 - DNA, 473 bp, Arabidopsis thaliana landsberg
gtgttcgatcaaatgtctccacttaaaggtagactggaaacgaagaagaagaagatgaaaggattcaaatcttggattttcaaatacaagcttgagaagagacgaattaggaaactacacattcaaggctggatcaaaagagtaagttggaggaactaaaagccaatgcactaaaagccaatgcctgttttagtttaacctatctatcatgttagcaacaccgtattgtcattcattagaccattatactacattttacttcagatgagttcccagaattcagcttccctgaagtgttcttgaactaaccttactctgtgtgaatatgcgtttggtggtcaaacttggttattagtgtccgagctaagacatggtagtggcagacacattgttctcctcttctatcaaaagggttagaaattactccatctgttcctttttgtttgattttttaggaaaaatacacatattaa

SEQ ID NO: 192092 - DNA, 48 bp, Arabidopsis thaliana landsberg
atcgcgaagaccctggcagacaacagattttcctgggacagcgtaacg

SEQ ID NO: 192093 - DNA, 195 bp, Arabidopsis thaliana landsberg
caaggacaaggacgaggatgcggacgcggtcaagaagtggtcacggtcgtagaggaggttgtggacgtggaaaaggaaggggtttccctcccaaaaaattcaatgccaagaaaaccaacaaaaatcttcaagtcaatgattttagtcgtgtttcaaagaaataagatgaaagtacttgttacagatgtgacatga

SEQ ID NO: 192094 - DNA, 266 bp, Arabidopsis thaliana landsberg
atgcgggccctcgccgttggtgagcttggggatgctaggccccggtctgtagccctgcttggcgtttcaagggtttccagattgtttttgtgctataggtcacgacgcatattgcattccctgttttggctcatgcattagtacctcaagtgggtctagcaactggggttacagacctccacgggttgctcttgagagcgcacctcgttcagcttctgaagcagaggtggttcttgacagagttaagatggccttagcagtgggag

SEQ ID NO: 192095 - DNA, 315 bp, Arabidopsis thaliana landsberg
atgattcttattttggaaaatgaagctggacaaatcggagtatgctacgggatgctaggcgataccttgccaagtccatcggacgttgtggctctttacaaacaacaaaacatccagcgaatgcggctctacggccctgacccaggcgctcttgccgctctccgtggctctgacatcgagctcatcctcgacgttcccagttcagatcttgaacgtctcgcctccagtcaaacggaggccgacaagtgggttcaagaaaacgttcagagctacagagatggtgtcagattacggtacatcaacgttggaaatgag

SEQ ID NO: 192096 - DNA, 55 bp, Arabidopsis thaliana landsberg
attccttcaaccgcaacacttttccattttcagacagagtattcattcagctcag

SEQ ID NO: 192097 - DNA, 3763 bp, Arabidopsis thaliana landsberg
atgacttctactgtgattctgggatccccctccgccgaggtaaaagcttcgtactggttcccagatggagagacccaggaccccataacctcggccgaaaccattccctcagctctcttcactcaccttttctgcgccttcgccgatctcgacgctaactcccacaaagtttttgtctcccaagcgcacgaattcatattttccaccttcacggaaaccgtcaagattcgaaaccctcaggtgaagaccctcttgtccatcggcggaaaaaatgcaaacaattctgcgtttgcgtccatggcaagtaaccaccagtctcggaaaacgttcattgattcttggatttttatcgctagatccaacggattccatggtctcgatttagcctgggagtacccgaacagtgatcatgagatgaccgactttgggaatctagttggagaattgcgagcagcggttgaggccgagagcagacgcagcagcaaaccgactttgctgttgaccgctgcggtttactactcctcggtttacaagacgtttacctacccggttcaagtgatgagagaaagcttggattgggttaatattatagcctatgatttttacggaccggtgtcgtcctccaaatttaccgttccaaccgccggtctgcacgtttcttctaacaacgaaggtataattaagcatatatagttgtagtatataagttaagaagggatacttcggtgatcaatttttttttttttttgtttaacttggaactatatattggtactttggttgataggtccaagcggcgtctctggtttgaaacagtggattaaggacggacttcccgagaagaaagcagtcttgggattctcctacgttggctgggcctggactctccaaaacgataaagataccggttataatgcggccgctgccggcgtagccaaatctgaggatgacgtatctgaggacggttctataaactatgctcagataaacaagttcataagggatgaggaagcagcaaaggtttatgaccccaaggttgtcggacattattgtttcgccaagaagatttggattgggtacgaagatactcagagcgtcgaggccaaagtgagatacgctaagcagaacggtctgcttggttactttgcatggaacgttggagctgacgataacactgttctatacaaagcaggttcgcctctttctttttttttacataaatattcttgtttggttacgatactgaatcgcagcgcaaattataaagcctatatatgggattaattcagcactaccgcgtctgtgatatatgtatattgagatgtacagcatccaaagcatggggtgtttaattgacaaccatcggaggaggtgcggacacaagttatagagattgaccacaataatcaaagacgagtgaggaattagacatgtcggcttatgtgagatcgcaaggacatagataaacacccctctctacttatctcgtagaccgacataaaaataaaacatgcttgttgtatcatatccttgtaaacaaacaaaaaaatatttatccaataaataaaaatgtttgatttctatatatatacttctttcttaaagaaatgtttgattctatatgaaaaataacaaacaacatgcttgctttatattattaagagatcatctaatagaaaagctaaaatctttataaacccccaaagaaaagaaaagaacaaaagagctgaatcgatatacgagaaaaacattgaaattctctttaactaatcactcaaaggtgaactaggcctggcctttggcacaaacccaagatacaaaggtattgagcttccaaaataaataaacgttttagtaacaaagttagacctcccaaaaaatttgttattgcaaaactaggtcctatgtttctgaaacttaatatttaatcttaattcttaaatttatctatttgttattgcaaaaataggcctcattcccgaaactttaagatttggtctcaaattttaacttttatcaacaagacctataacaaaaaaaaaatgttttgtattgcgcctcatatttatcaggaccgacactgggtgaaccacaatgaaaagagattccagaatcaagcatgcagcatatcttttattatctatctactcccttctgactaacttgtacgcaataaaattgtaataaaggtgcttgtttttaaacatgcattcttttatgactaacagattgatttacaatctgatttccacattttaataaaaatgttgtgacaattctagaccaaatctagttattacattttgaattttcaaagttatatgagttacgataatgttgtacacatgcacggcttatacaatagtcttataggaatttctcaattaattaatgtccagtttaatgaagaatgtacaatattattgtaatgcatgtgaaccagttcattggtagacaaatagacttgttaatatggagtcatggacgatgaccggagtctttttttattctatggactataaccaagtctttttttatattattcctttttagagtattaatttcatgttggaaaaaactataatataaaaattcccactctagagatatgacatacctattagacgtataacttggtaaaatattcatatgttgttgatctgtaacatatgttgttgtttatatattcttgccagttgccaacgttgattgaaatcataatgggagtagtcaaaccaaaacttttataattatattatacgttaaaatcttcaactacttgactaccataaattaatttttaaacttaaaaagagatttgtgaaataaaaaatacatcaactatgatatgaatgcgctccttgatgggtctggtgtcacagtcacaacatttaacaaagactttggcagtctttgaaaatcaacttaaatccactataatccttctaaattcaaagttgaaaattttcttttcttttaatatttataatacctcttcccaaattccctatagatagagaatgaaagcaccctcttagtttgtactgcaaggcacaacaaacaaaataacacagaaagcatttcgtaaaagactttcagacaaaaatgtatacggaagtagttaaagcatcctattggttcccagatggtgcatcatccccaaccaccggaagcgtagtcccacaatcctcagccgtgctaatcgattcaactctcttcactcatcttttctgcgcctttgccgaccttgaccctcagaccaacagcgtcgttgtctccggcgcttacgaacaagaattctccaacttcactaaaatcgtcaagaagaaaaaccctcacgtgcaaaccctcttgtccatcggcggaagaaacgcagataaatccgcgtttgcgtctatggcaagtaaccccacttctcgtaaatccttcatttggtctgcgatctccagcgctagatattatcgatttgacggacttgatctggcttgggagtacccaaaagatgatgtggagatgagaaactttggtcaactacttgaacaatggcgagaagcgattgaggacgatgctgaacgcaccgaaagaatgcctttgatattgacggctgcggtttactactctccggtttacgattctgtttcctacccaattcgagagattaaaaattttttggattgggttaaccttattgcctatgatttctactcttcatccacaaccattggttcacccgccgctctgtttgatccctcaaacccgaaag

SEQ ID NO: 192098 - DNA, 75 bp, Arabidopsis thaliana landsberg
atggctatagctatcaaagttcataaggctgagcgtgatagcttcaattctacgtatcctgaggtgaaaggtcag

SEQ ID NO: 192099 - DNA, 159 bp, Arabidopsis thaliana landsberg
atgcaggctttggcccgcgacggcgtgaaaggcatcttcgagaagctggagcaagagttcgatttcgtggtcgtcgattcgcatccggtgctgtcggcgaccgattcgctgctgatcggtcagcgcgtcgatgccgtcattttgtcggtgctgcgcgag

SEQ ID NO: 192100 - DNA, 2184 bp, Arabidopsis thaliana landsberg
tgtgtaactttgctttgaagatatggaacggacaacaatccggcgcagcggctgttcttttagcagataacattgttgagccattgataacaatggatacaccccaagatgaagatcctgactttatagacaaagtcaagatcccatcagctttaatccttcgctctttcggtgatagcctcaagaaagctcttaaaagaggtgaggaggtaatcttgaagatggattggagtgagtctataccaaaccctgatgagagagttgagtatgagctatgggctaatactaatgatgaatgtggtgtacactgcgataaacagatagatttcattaagaactttaagggaatggctcagattcttgaaaaaggcggttatactttgttcagacctcactacatttcttgggtttgtcccaaagagcttctacttagcaagcagtgtaggactcagtgtataaaccaagggaggtattgtgctcttgatactaagcaagaatttgaagatggatataatgggaaagacgtcgtttatgagaatctgaggcagttatgtgttcataaagtagctaaggagaagaacacttcttgggtttggtgggactatgtgacagattttaacatcaggtgttctatgaaggagaagaaatacagcagagaatgtgcagagactattgtggaatctctcggtaaaaaaggtccttttgttttcctagagatgtcacaatctgctagcaactctttctataacagtttcagggtttttctttttcctcagggctgtctcttgagaagatcaagaaatgcattggtgatcctgatgctgatgtagagaatgaagttctaaaagccgaggaagcttttcaggttcgcagtttcttcaaattcacagtccatcaagctgttatttttcctttgatgacattttgaagttacagttaggccaagagaatcgtggcattgttacaatctttcctacattaatgatcaacaatgctcaatatcgcggtaagctcgtccttctcaccgataatcacaaagtttgacggttttagaatcttaatctgttccatgctcaggtaaactggagagaaccgcggtgctgaaggctatatgttcaggattcaaggaaagaacagaaccgtcaatatgtttgaattcaggtcaagtaacttcctagataaagatagtcgcattctgtgaagaacactcttaatttctttttgatccattctaaaacagatatagagaccaatgaatgtcttatagaaaatggaggatgttggcaagacaaaagatccaatgtaactgcttgcaaggtatttcgtgataaggagcggtataccaataactttatcagtctatatcatatcttctttattagattatatgaattgttttcaggacacatttaggggaagagtatgtgagtgcccggttgtcgatggtgttcaatataaaggagatggttatacctcctgcaaacgtatgtttttgaatcttctctttttaatatatctcattgcacatttttgttcaatgatcttaacaaagtttgtgaaacagcttatggacctgcgagatgttcaatgaacaatggagactgctggtctgaaaccagaaagggtctaactttctcttcttgttcagttaagtgactgctgctttttcttccactttgctgaagtttgagactttttcttaccttttgtatttgtttgatgtaggactcagagacatcaggatgtcgttgccctctaggtttccttggagatggtctaaaatgtgaaggtgaaattgtttcgacaatttgtcatagtaacatcagagtttccttgacattgtctctgaccaatctttattgcttcctaataactagacattgatgaatgcaaagagaaatcagcttgtaaatgtgatggctgcaaatgcaagaacaattggggaggatatgaatgcaaatgttctaacaatagtatctacatgaaagaagaggacacttgtatcggtatgttgaaaacgatgtaaaactattttcagatattattagaaggaaaatctcaatgtaaacatgtgcagagagaagaagtggatcaagaagcagagggttgttcacaattgtggttctaaccgccatcgcgggtatctctttaggtgcttatatattctacaagtaccatcttcag

SEQ ID NO: 192101 - DNA, 457 bp, Arabidopsis thaliana landsberg
gggccgtggcggttggcgtcggtcgcgaagggatcgctggagggcctggccctggttccgtccggtgccgatcgtccgctggcggcgggcgaggtccgggtcgcggtgcgggccgcggggctcaacttccgtgatgtgctgatcgcgttgggcgtgtacccgggtgacgcgccgctgggcagtgaggcggcgggggtcgtcctggagaccggtcccggggtcacggacctggcgcccggtgaccgggtgatgggcctgatcctcgagtcgttcggtacggcggcgatcgcggatcggcggatggtcgcgccgatgcccgagggctggtcgttcgagcaggcggccgcggtgccggtggtgtacctgaccgcctattacgggctggtggacctcggcgggttggcggccggggagcgggtgttggtgcataaccggcgggcggtgtcgggatgcggcg

SEQ ID NO: 192102 - DNA, 102 bp, Arabidopsis thaliana landsberg
agcgaggtgtggttgttctgtaaggagattagtcgtttccgggccaaagaagcagcagaggaagatcgagaaatgaataagcgaacaaagttatatatataa

SEQ ID NO: 192103 - DNA, 159 bp, Arabidopsis thaliana landsberg
gttccttatttctccgattctttaatctaagaaaagattttcccgagaaaatgagtctttctgattttggttttggttacagtgagcgtcatgaacgatggagagataatgtcgatacatcgtcttgagaaatccatggccgtgagaaacgagtctcat

SEQ ID NO: 192104 - DNA, 1138 bp, Arabidopsis thaliana landsberg
atggcgaagaagaagaaggatacgaagcatactcgtctctgcgaagccactggggcttgggccaccaaggtccttgaggattttcgcgcctccgggaacgattgtgagtttacctcttcgacccaaggaatttaaaaagtttcttcctttgttcttaattgtgtttcttctgctaatcttcagatgagctccgatactctctacttgcaatggttttaaagttatagttagctttggtgatttctatctatcggaatgttctgtctttttctgtttggttgaattggaaagtgtgttggctttctattgtgtagcttacgtctttgagcagcaacttacaaatagcgaacgtggcattattcatcagatgtgccgaactatgggtctccgatcaaaaagtaacgggtcagttacagcttaatccaattttgtctgacgtttggggtattatgcaagttttgggtttcatctactacttgagtttctaatcttcttggattttctgtaagagtggggaagaaaggcgtctttctcttttcaaaggagatggcatttcaaagtcagacaagaggcgtatgtatgaagccagaaatcagaaagaaaaagaaggagatgggatttcaaagtcatacagcaagcatcgctatgaaaccagatttcagaaagcaggcggtataagaaagacgagaatatctccaaagaagctcaaatgtgtgtcatttccaccagaggctaaagctgttctgcacgacttatttactcgctatccaccttgtgacggcgatactacagggacatcactgggtatatatactacgggaaacgtcaacagtaattggaaagatgatttcttcaagaaacctcatatgacaaaacacgatattgaaaataacgtggtatctctgagttctagactgaaaaaagaaagacattttcgagaggttagcagttatatgtattttcaaaagattgtaatattttctttacagaaccctgtttcagaaagttggaatcatgcactgttgagtaaaagaaatatccttttatttgaatgatgttacagatctttgaagcacgatcaaagcttcccatcgcatcttttcgcgatgccattatatctgcagtggaatccaatcag

SEQ ID NO: 192105 - DNA, 820 bp, Arabidopsis thaliana landsberg
  unsure (1)..(820): unsure at all n locations
atgatccgagaaccgagagtttcgtgtttcgatatgttaacagatttcatttataaaccatggtaactctataattttgacagctcatccaccttagtaaacatttaatacgtaggaattaagtggttatgtggtccatgcatatgtctcgatactaacacgtaaatggaaatatggtttcattcgtacctatgtttctgtatccacatacgagtatatttacttatgtttttttttagttttaaaattattaatggagtatatgtctaatatatctgaccgaaactaatgtcaacttgtttaactaaaaacccttacatttttcttctatttcttcttcttttttgtactacgataaaaaaaaatcataaaatatgtaattatagctttataactttactcagttgcaaaatagataagagttaaattgaagtaagaaaaaaaagtcatgaccaataatgcactaattactaaaggcaaaagaagaaaagaatcatcaaagtcatcttttatagaaaaacaaagaacttttattgttttcgaccaattaaacggtgcgagtnnnnnnnnnnnnnnnnnnnnnnnnnttgtcgtattctctagcaactccacctctagtttacttcctcaagaaagagtcatatcatacgttaagtctatatcggcaaatcttgaccaaaagaatatatcaaatagaataaaatatattgagatcgaaaggaatagactcttattccaaagattagaaatcagaatgaaaatggatcggcaaacggcgccgtatttgttgccggccgccgggaataaacaagaaaagtaa

SEQ ID NO: 192106 - DNA, 106 bp, Arabidopsis thaliana landsberg
atgatgagaaatcgattgaagccgttatatcgttttcgaaatcttcttgtgaatcaaagattatggacagatccgtgttgttgttgtcatcttcatcgtcttgaag

SEQ ID NO: 192107 - DNA, 229 bp, Arabidopsis thaliana landsberg
accatgctaaagaagaagttgcactgcctgctcccattgccaaactgaatactgttcaagaggagaatgttgatgatacaagcatctcttcttttgactcaagtaaatctactgacgatgtggaatctggattattccaaaatgagaagaaggtgaggggaggtccatctgttttagctcaatcccttttttcctttttaagatattggcctctggtcctttcatatga

SEQ ID NO: 192108 - DNA, 671 bp, Arabidopsis thaliana landsberg
ttcttctgcaaatcttctcagctttacttctttgtcttgctcaagatcagtcaggtaaaaaaatataacatcttcattgattcaaaagtttcttctaaagctttttctttgctttgttctcaggattcatcagtttggattgcggttcgcctagagaaactagctttcgtgagaaaacaacaaacattacttacatttccgatgcgaatttcatcaataccggtgttggtagaagcatcaaacaaggataccggactcagtttcagcaacaaacatggtataataaatagctttctcaagatcaatgaatgttatcttaaaacctaacacttttacttcttccacaaggaacctacggagttttccacaaggcataagaaactgctataccttaaacctaaccataggcgacgaatatctaatcagagccaatttccttcacggcggttatgacgacaaaccctcaacgcaattcgagctctacctcggacctaatctttggtctacagttacaaccacgaacgagaccgaagcatcaatctttgagatgattcatatcttgaccactgatcgtttacaaatctgtctggtcaagacaggaaacgcaacgccttttatctccgctttagagcttcgtaaactcatgaacacaacttacttgactcgacaag

SEQ ID NO: 192109 - DNA, 63 bp, Arabidopsis thaliana landsberg
atggtcttcacaggttccaatggcacaacaataaaaggtaaaacatctacttcagcgacgata

SEQ ID NO: 192110 - DNA, 93 bp, Arabidopsis thaliana landsberg
attatgcatggacgaaccaaaggtgaatccggagttgaacttactaagagaaaaatacacatgaggggtaggcgagttcatggaattggctag

SEQ ID NO: 192111 - DNA, 89 bp, Arabidopsis thaliana landsberg
atttagtgaaatcggaggagattagcgacggagttacggcggactcgatggcgattttagcgaaaatggctgagtatccgacgggatga

SEQ ID NO: 192112 - DNA, 98 bp, Arabidopsis thaliana landsberg
acatgactcttgataaagacacaactgtgttaacagacacgactcttaacttaataactaacttatacgaatgtgactttgacttatacgagatttga

SEQ ID NO: 192113 - DNA, 1258 bp, Arabidopsis thaliana landsberg
gttcttcatttcgcatgaccgggaatttcatgtggcctcacttaattacaaacccgacttcaaggtcatgccagaaggatgggatggtacaatcaaagatatggatgaagtccattatgagatctcaaagaaagaggatgacatgctttacgaagaatttgtccgaaggtttgagttcaacaaaatgaaagtaaggcccttcttttgcccacttgagtatgcattgacttagtaaaccattactacatttggtctattgagacattttcccatccatatgttaattatcaagtgacctgcttgcaacttagaaggaaaacttgagactagatgcaagtttggaaccctctattctaaatttggtaacttgtaaaataaccttgaaagattgaaagtaataatggtattgcaacttgcttgtggattgtttaaaaggttattggtttgaatagatccacgccttttgattgatatataacatcagcgttcctgcttgagttcttgctgagttattagacgttctttggtcatttctccttggtgataacaaacgttactttaccttttactctctaaaccagtggagaggagaagtgatgtgccacaagtacagcagagacgttcatcagagggatggaaaatcacggttgagaaattgggtgctaagggcaaacgtgaagccggaggtggctggaagtttatgagtcttccagatggatcaagccgaccactcaacgaaatggagaaggtctatgttaagcgtgaaaccccactacgtcgccgtaagatctagactccatcaatggttatatcaggatgggaatgttatgtctcctgtgtgttcttgtttgattctgattttgcttctgtttgatcttaagttgaatagaataagatgggtagcttttgtttttcgtttagctctctctaactttatcagtgaggttcaaataaatcataagacacagtgttgttttaatagaatcatgatcttgtattagaattctctgttatgtttaagaaggttccttcatcgtttgaaacgaattgaaagatgatttagagaatcttgtcctaatttgttgtggtatgttaaaagttgtggtgcgtttggcaaagctaaaataaaagtatgtttgtttttgtctaggaagcattatatcaacggaggtgatgcgttactcgcccgcgaaccagaagcggaggtcgaagcggaaacagaagcggaaggagaggcgcatagcatgtctcaaagccg

SEQ ID NO: 192114 - DNA, 97 bp, Arabidopsis thaliana landsberg
cttttctgcctcaaatattttgaaaagacgcttaattcacggcttcattatggacatcgatcataacatggcagaggttgagtggttttcagcagcg

SEQ ID NO: 192115 - DNA, 267 bp, Arabidopsis thaliana landsberg
atgtttatctcagatgtgccaattgctaggagacgttcacttcaaagattttttgagaaaagacggcatcggtaggcatatctgcagtgcttgttttatacacatatagctctcatctttctccatcactcacctatgagtttgaccattagatttcatctaatagtaacttggaccctctttattttcagatttgtccacacgaagccttactctgctacgacttcggaagcagacaaaaatgaaaccagccccattgtgacatga

SEQ ID NO: 192116 - DNA, 1222 bp, Arabidopsis thaliana landsberg
atgcagtctacggttgcgctctttccacaagaggtagatagaagcttgaaacacaagcttgatgatgagagaaatgtttggatcacgagaaggagaagagacccaagtgaagcagtccatgaagagaagaggaggcgagagactatttctaaacatgaagtgaccccaaaccgcactactgacaccgcaactaaagaacaagtgctctctcgactcagcatttccagagcaaagaacacaatccggaggaatagagaggccccacctcctcatgcgatctctagtatggagccgattccaagcagtaacccaagcaatgaaagcgtgctttggaatatggttcttaaatcaaaccgacttatgccacacaacaggatgacccgaagggtgaagcgcttgccaagtcaaagcagaggagaaggagagagatggaggtctgtgatccatcttccaaaggtacacatcatcaacctctgaggaaatgctatcattgcaactaggcagggcgtttttgatcaaggagatgatgggattacgacttctagaactcataaccctccacccagcacccgagattgcgtctcgaaccaccgcctttttcgggagacctatcacctgaggacccaaaggtcccgtaaggtctaaaagagggcccaaaccagtccaattgtcgtgccagaaactagccgtaatccctgatcccacttcacaaactaagaaaggtctcgccagactacgcagcttacacagccgcttccaaatccagctcccagcattgtagggattcaaatcccagaagttacgatgtccaataagattcagcctaatccaagacacccacagagaccctactttagtgaaaagcagccagagaagcttcagccaggatgtccaaagaaccctaatccttgatatctattgccattttaagagtttgtaaagttcatgtcctatgatttttacactgtctttgttgtattgacaggagataaatgctttgtttgataaatatcacactagtcagggtgaacttgacattgaccttaatttaggctcactagaatttctttggaaagaaatgggtcatgtttctcaaacaacacaggtacccggatttgatcaatcacagagccaaacaaaaaactctttcgatttcgactggggttacaaaccagactcggggaagaatgacccagatgcggtttttggtgcacgtacatga

SEQ ID NO: 192117 - DNA, 59 bp, Arabidopsis thaliana landsberg
acgctctcttatcgtcggatgtgtttaggtttgcatcaaagtcttcagagaaactgtaa

SEQ ID NO: 192118 - DNA, 339 bp, Arabidopsis thaliana landsberg
atggtgattgatgttcggtgtgtcccaagtaattatcatgccagatataaggcccaggagcgcacgtaggtattctaatttagtttcagttgttctagagattttgatgatccatatgtgttctgatagtattgtagagtactaggttatgatttgaaagtatattcccttcaattggaaattgagaatttattcactcattgtagatacttctaccgcttgctatccgggtcagatccattatcaatccttgaaaaagaccgttgctggcatgttcctgaggagttaaatcttcgctttatgcaggttcacttactaactactgtattgtcagcttaa

SEQ ID NO: 192119 - DNA, 889 bp, Arabidopsis thaliana landsberg
agttccgagaagaagatcatcatcaatggcgacttctctcttcttcatgtcaacagatcaaaactccgtcggaaacccaaacgatcttctgagaaacacccgtcttgtcgtcaatagctccggcgagatccggacagagacactgaagagtcgtggtcggaaaccaggatcgaagacaggtcagcaaaaacagaagaaaccaacgttgagaggaatgggtgtagcaaagctcgagcgtcagagaatcgaagaagaaaagaagcaactcgccgccgccacagtcggagacacgtcatcagtagcatcgatctctaacaacgctacccgtttacccgtaccggtagacccgggtgttgtgctacaaggcttcccaagctcactcgggagcaacaggatctattgtggtggagtcgggtcgggtcaggttatgatcgacccggttatttctccatggggttttgttgagacctcctccactactcatgagctctcttcaatctcaaatcctcaaatgtttaacgcttcttccaataatcgctgtgacacttgcttcaaggtttgtttgttttttaatcgttttcatcaacatgattgatatatatatagtttttgcacttgaaaaagttttgatttttatttatgtaaaaaactgcagaagaaacgtttggatggtgatcagaataatgtagttcgatccaacggtggtggattttcgaaatacacaatgattcctcctccgatgaacggctacgatcagtatcttcttcaatcagatcatcatcagaggagccaaggtttcctttatgatcatagaatcgctagagcagcttcagtttctgcttctagtactactattaatccttatttcaacgaggcaacaaatcatacg

SEQ ID NO: 192120 - DNA, 153 bp, Arabidopsis thaliana landsberg
aatgaagatgacaatggtcatttggcgtattggttgacaaacacatcggcactactgtttttacttcaaaaaagtcttaaacctgctggcgccggagcaacggcaagcaagaagccacccataacaacttccttgtttggaagaatggccttg

SEQ ID NO: 192121 - DNA, 109 bp, Arabidopsis thaliana landsberg
aactgatgaagctgtgattctcaacttactttgtgccttgcatcttttcattttttgtaaagcactgcccgaagatcggcctcgttttcaattgatgtcattgatgtga

SEQ ID NO: 192122 - DNA, 373 bp, Arabidopsis thaliana landsberg
cgtgatctgtccacaaggatccaggttaacgagggatagagtcaacgacaaaggtttaagtttccggagaaagacgatccaaaatgtaggtacagtctgttttctctgacagttactaaatttccataacgtaattactattttggattaaccatattttttttttgttgccaattttgattctcaattagttgtctaccaaacaatcctcaaatccacaaggaggtacattttgcctacaaacagtgagattctttaacgttctgccccggatctcaggtcattcaacttataggttgccagagactgagtataagttgccgacctttcttgatcacgtagagccaaagtgccaacgagagaacagaagaag

SEQ ID NO: 192123 - DNA, 313 bp, Arabidopsis thaliana landsberg
acgcaactaccgtgacgcaaagctgaaaacacccggaagaagcttcatacgcatgacacggagatggaacagtgcctctcacggactcaactaccacgtgggtttaggtgctgttggagttgagaaaaaaatgttgatccaaattaatttaaattacgtctaacttaacttttgaggccttaattataggagttcctcttgaagatgccgttgctgccgccgcgagccgacttcgcccgtccccttatgctcgtctgctcagtggcgaacgtacgttcaactttcagtgtcagttgacatcgacgagttccag

SEQ ID NO: 192124 - DNA, 126 bp, Arabidopsis thaliana landsberg
atgagatcttctctaacgaacaacatctcaaatgtagattttcatccatcgacgtttacaatttcggatattcagatcgtccatgtcgttgatgtcatcatctccatctccaaaccgttgagataa

SEQ ID NO: 192125 - DNA, 1175 bp, Arabidopsis thaliana landsberg
gttactgtgaattctggaggagttgttttctttgccctgttcaatagttccagctctgaagatgcctctcgtaaggaagaagcagcacttataaaatttgcatcatggaggatggccacgcaatcagaacgtctaggttatgagttttccaagtggctaggggtgcaaattccgcacgtgcttcttttctttcttgtagcttttaaaaaatgtagtaatggttttgctcatttcactttctttctagaattttcaagtaatgagtaatcatcatgcgacaggctagagtaattcacagctgtaatcctgagtggacactgatcaaagaagccactgaaaaagcacaagctaaagcgacttcggagggggacgaggttggtgaaatgacatgttcagaacttctggaagcccttgaactcagccgttgtcttctcttaatgaggtgaaagcacaagattcatctttattctttatactttttttcattttttacttggaccaggagcataatggtgacagtttttttgttcctttgcattagtgtttaactagatgatagtaaaccatttgaaatatgaatataccatttgataatatattttaagaaaaataaaagatgttatgttattagatataaaaattgtattataaaataagaaagatctaaattacaaatatgaggtggaattattttattggataaaatttgataacaacagtttaacagaaatctaatcttgctttaaatgataataaatatgagagaaatagctgaacagaaatctagtcttacctaataggattatgtaaaatctagtcttacctaataggatcatgtaggcactttcaaatttacaatttttaatgtgatatttgtatagaacccctcttcttagcacaggattctctatttgtgattacagttatgttcatggatgtccaatgctggagagcatgagtagttttgaaactgaagaaaaagcagagagagctgctgcagctctagggagaatcttggtgttagatctagtaattaggaacgaagacagattaccgtgtcgtcagctgagatggcgtggcaacccggcaaatctgttactgacagacagaattgtgtcttctgcaaagcatcatgaatgctcatttgatgaagcttttgattccgccatcaaacg

SEQ ID NO: 192126 - DNA, 201 bp, Arabidopsis thaliana landsberg
atggatgaaaaaactagttgcttattggcacaagggaaatccaaatgtatgaatgaaatgagtgcaccaaaggaagagaatgtgaaacagtctgtggaagttgtagatgcgtctaagatggaaatctcctcacttgttgaattgtttactcctgagcaagtaaaggagcatatccgaagtcttcgtcagtgggtaggacag

SEQ ID NO: 192127 - DNA, 77 bp, Arabidopsis thaliana landsberg
atgcacgcgggacgccgtacgatgaaccggcgagcgggcggttcatggaaacgtggtggtgtagtggaggcgccggg

SEQ ID NO: 192128 - DNA, 720 bp, Arabidopsis thaliana landsberg
atcctcgtcacagtgtggagtccaaacatgaaagaaaatcgcaaagtagtgcggggaggagacccaagggaacaaataatgcaaatgtggttgggaggtactgcaatgatcaacagacgaggagagaagaagctgatgttagacctatgaagcactcagccacagatgttgtcgagcctaaaagacaaacaaagcaaagtagagaacaaatggtatccgcaatccaacgaaaaccaactgctgttactgagcaaaagcggaaacttgctggacctcaacaagatgtgagtgtttgagttaataaagccgtggtgtttgattattaatctgttttgtttctaatagcaagtgttcttgtctttgttcagaaactcaaagctctggatccagactcaaagtttgagtttgcaaagcggaaactccaagagagctaccaacaacatgagaatggttagtcaaatcgtcttaagagatttcaatatttccactattacaatacacctaattcttaatgacccatttgtttttgaacagctaagagacagaggacgatacaagtactggaaactatcccaaagcaaaataaagttcagaaaccgcaactcaagagacccgccacacgaagatagtccattttttccttcggatgatctatacaattactacgaccattcagaggcgttaatatacaacaaaagtgcattgacagatccaacataa

SEQ ID NO: 192129 - DNA, 1410 bp, Arabidopsis thaliana landsberg
gtcctatctcttcacgtcgacgaaagaatgtaagttatataattttttttatatcccatttatacgattcattcatatatatatatatatatatacatttaaatatttttcatattttttagaaagagtattggtcgccttctgaagagaatattgtgcttgaactatatgaagccgggcttgttaaagtaaactataatacatatggtctaaaaataccacatcgaaatcgtattattagcgaactattaaagaggacggaaaaacatgttaatagttcgataaaggctaaaaacacgatagatacattgaaggaaaattacaaagaatgggtagacttaatggataaaacaagtgaaagttcggatcgcagaactggagttatcggtatggatgacgattggtggcaagaacgtgaggtggtatgtaacaccccctcccaaactaccgaaaaggcatgccacttttcctagaaaacattattccatacttattatctatccttaacacattcacattcgccttattcaagaagcattcttattaaattcataaaaagtaactggtcttaagcaacaccgaaaactcgcaaacataattaaagaaatttaaaggaaaactgtgtctttgtattattgaaaaataaacccaaatcccaaagaacaccatgaagagagacaagcttgagcagctattcaacattatcttcaccttggaaagaaggggaaaaagggggttactcattgagcaaaacatagaacaatttcttaagctatacaacaatcatcataacacacaaccttagagcatctccatcaataagaaactcaacaaatttttcaaacaaatttttttttagtattttattgtaatttagttatataattaaatttaattttttataaagatgaaccaatgtaatagaaaaaaatattatcattagatagagagagtatctaagagtttctcatatgagaaactttctactctctctctctttcttttttattattgatattttttttattatgagaaactctattaaaatacttccaatgaaaatggtcttagataccagcaatccacctaacatgctttaacttctaacaatatattcataacaaccatcttattatgggttaagacaattttagtaaccgataaattgatgagagtaaagaacacaaaagtgtttagcaagaattatattagactatcatcataataaagatgcaagatttattgtcttgtataaagatgaaataaatctaaggctcatcaaaatgataaactaaatgtaaataatataattaaacataatatcaaatttactaacctcagatattgacaatccacaatgttattaatataattagacataatatcaaatttactaatctcggatattga

SEQ ID NO: 192130 - DNA, 268 bp, Arabidopsis thaliana landsberg
atggagaagaagaaatacggttcctccacattagcaatagaaccatactgtctccactgttcggttgaaggtaaaaaaatgtaatgggctctctctctaaagaacggtttttctggcagagttccgtctaaggggccgggtgaatccgagctttggtatggggcttatgacacgactaattcagtatcttatttttgttatttatatgaataatgtccacggttttaattatggggatgccactttatacggtgattcgtttaggtga

SEQ ID NO: 192131 - DNA, 763 bp, Arabidopsis thaliana landsberg
tgtctggggggtttggtgaaagaaaaccatttcctggccaaagattttcatcagaaggctggcttcgcattctacggaaagctggccttcgaactgcagcagaagccgatgtcatacttgaatgtgccaaaagggtggaatttctgggtaacgagcgtaatagatcttccgaagaagatgattttgaaacggatcttgtacattctgagaaggatatttctgttgagttatcaacattagcaggatctgtaattgaagcaatacttttaaactttgctggtttttacagcactgcattctgcaacactcttggtcagattgcttgtgtacctgctgaatcagggttcccaagtcttggtgggagaaaaggtggcaaaagagtccttacacgttacagcgaagctgttcttttacgagactggccccttgcttggagctctgtccgtattctttcaactcagagattcattccacctggattttcgtggacagcattacgcctaaaaagtcctccaattttctcaactgttcttaaacacttacaggtaagatcactcttcttctctctttgattatttgtgcgctcttgtcatggacatgtgaagaaagaggactgatcatataaacccaggtaattggacggaatggtggtgaagacactcttgctcactggcccaatgatccaaatgtgatgaccaaagatgttacatcctgtgaagttttgaagtacctggaaattgtttggaactccctcacacttcag

SEQ ID NO: 192132 - DNA, 123 bp, Arabidopsis thaliana landsberg
gattctcacacgggacaacatgcaagcatgcatattgtcagaaacatactcaagaaagccaaagaaatgaccggcctcgagaatgaccagtatgcaaggacgctatactatcctaagtcctaa

SEQ ID NO: 192133 - DNA, 398 bp, Arabidopsis thaliana landsberg
atggtggaaagaggcaaaactacagcacatttcaggttagttattttaaacggcaaggtgttcgtcgaaaactacaagaagtctatacaaactagagatgcgttcacactatgggggattcttcagctgctgagaaagtatccagggaagttacctgacgtggatctcatgtttgactgtgatgatcgaccagtcattagatcggacggttataatatattgaatcgtacggttgaggatgcgccacctccgttgtttagatactgcggtgatagatggacggaggatattgtctttcccgattggtcattctggggatggtaagtaatagaatataatctcttctatcttccttttttcttcttttagtttttttttgtctgaagtctgaactctga

SEQ ID NO: 192134 - DNA, 395 bp, Arabidopsis thaliana landsberg
aacctgatattcttaaggaagtgagacagaaattagaaactgggttagtgaagtttgaggtaagattaactgtgttttgttttcttagcttcactatcctttattctcttttttaaatgtctgttcctcaatcaattggaatcaggtgttgtgtgacaaggacccttatcccaaaaaggtatgtacatcataattttctggagttacagtttgattcgtgtacattaaattggggtttctaaaaggaactgctaatgatttagattgtgggagagggaaatctcgagagacgaatgctagaaatgaacaggaagagaataaaggttgtgaaaccaggttcaaagacgtctttcgcaactactgaagtccgtggaagctatggtcctcctttccac

SEQ ID NO: 192135 - DNA, 182 bp, Arabidopsis thaliana landsberg
gtccttgagcttttgtttagcgtcaacattagagacggagtcaaaccgagtctacccagtgggttctacgggaacgcattcgtcgtcggatgtgctcaaaccaccgtgaaagacttgacggagaaaggattaagctacgcgacgatgctcgtgaaacaagcgaaggagcgagtcggtgacga

SEQ ID NO: 192136 - DNA, 185 bp, Arabidopsis thaliana landsberg
gtgaaagttgacagcttgatagggaagaagattggattgtatttttcagctgcttggtgtggaccgtgtcagcggtttacaccacagctggtggaagtctacaacgagctctcttcaaaagtaggttttgagattgtgtttgtttcaggtgatgaggatgaagagttcatttggagattatttca

SEQ ID NO: 192137 - DNA, 167 bp, Arabidopsis thaliana landsberg
atgaaaaacatcgcctgcgccgtcctcgtcgccgcctcagcggccaccgtggcgctcgccgcggaggctccagctccgggccccaccagctgctcctccgccgtcgcgcccgccgtcggcgccgccctcggggccgccgtcgcctccttcttcgcctactacattca

SEQ ID NO: 192138 - DNA, 1341 bp, Arabidopsis thaliana landsberg
  unsure (1)..(1341): unsure at all n locations
atggcaagaaaaaagttaaatctaacttacattttcaatgatagaatgaggaaaagatcgttcaagcagaggagagaaggatttctgaagaaactcaatgatctcaaggttttatgcgatgttaatgcatgtgcggtcgtctacaatccattcaactcaaatccagatgtgtggccatcaaaatcggaggtgaataatatcatcaagaaatttgagatgttaccggagacccaaaagaaagttaaatcggtgaaccacgaagaatttctcaatctatacatctcaaaagtcgaaaagcaaagtaagaaattaattgtagaaaataaggagacttgcttaaaggaggtcatgttcaagtgtcttggtgggaacatgggagattttgttatgaatgataatgatcgtcttgacttatgtaagtttattgatcactatcttagaaatctttatcatcataaaaatgtaaccctcaacaatccaaattntgaaatcggagaatcttcttcattaatggatatggcaccaaccgctacaactggaaacatggcaacaactgtagtagatgaaggcatgacaccacttcttattgctgaagggagttcctcctcatttttgaattctccactcttcaactctcctcagctaaccaacgagttgcagcttatagtctctcaaaaccatagattagagaattctctggcaagtaatctctttttcagtgaagggcaagacatttgcattccagatatgaatcaggtttgtatgttgtaatcattttatatattttacatcaaaatctatttgagttttctaatagtatacttttctcaactaaccaaataattgcagtccataatcccatcaaaccaaggagcagaacatgtggattttcttgaaagtaattttctacctaataacaatcaagaagtttatatcccagttatggatcaggtttgtatttttttatcatcatctataattttaaatcagaaatgatatctattctagtcttcaactcttctaaactaactaaacaattgtattatctctttaaaaaagggatcagagacagttttttttttgcaaacaattcctttctaaacacaaccaagaaatatacatacactcaagttgtaatttgactaatattcatgtagtttaactcattgttaacagaaacatcaatattgttatttgattgtgtttcaggatgaagtttacaatccaaatcaaaatcattatgagaaccaacaaggattcattgacgagatgatgaaatatgctgagaaaacaagttttccttggatggtagagaaccactgttataatcacaaccagtaa

SEQ ID NO: 192139 - DNA, 2185 bp, Arabidopsis thaliana landsberg
atggaggttggtttaggacaaaaccaaacaactgaaatcaaagtaggagtagtgcttgatctccacacttcattttccaagctctgcctcacttccattaacatatcgttgtccgatttctacaaatatcattctgattacaccacgagacttgcgattcacattagagattccatggaagatgttgtccaggcctcatctgcaggttcgtttcttctctctcttgcatctttattgggatttattatcagtttatgttgattgttggatgaaacatgtacgctctacttaattaggaatataattaagcgtttggccagacatgatttaatatctaagggctactattttcttttagtctgaccaatcttttacatggcttcaaaatttaggctatttccatatataatagccatatacatatgcatagctattatcaaccttattggcttcagacaagcaactacaatatctaatttttaacaaaataaaacgtttcagtacctatgaacttatgccggtaatcaattcctaactatttatttttaaacaaattaaacaattaatgatgaatcatggtagttatttttttccccaaatttgctacaaatctatggtttggtagaaatttgttttctattaatttgaagcaattcttgtcactttttttgtttggttgtttgacatttatgtatgacggataaggattttggtgctactgggttatatgtcaagtggcgaacggactctaacagtgggtggtgaaatgagggtctcacactaaacggattatcaattatcgatttgatatatatatatatatatatatatatatatatatataagatatgaatttccgtaacatatggatgtggtagtaaaatacaattaacttttatcattactgtgataagtgtgataatgattttggacggaaaataggttacaaagtagcatcttttcaaattacattttgcaatttgtttatgaaataataaaccataataaagtgctaaatatagagtaagacacatttgatattttcattttaactcatgcgtaaacattatttgtctgataattttaattcactcattagttcccaaaaatctgataaattttaatttactatttagtgataaatttaacctctataattttcttattctatttgtttgcttgtggtgcaagcagccttggacctaatcaagaacgagcaagtgagcgccatcatcgggccaagaacctctatgcaagctgagttcatgataagactcgccgataaatcacaagtaccgaccatcacattctctgcaacatgccctcttctgacatccatcaacagcccttactttgtccgagccactctcgatgactcatcccaggtcaaagccattgcggccattgtcaaatccttcgggtggagaaacgtagttgccatttatgcggaccacgcactcggagaaggaatattgccattatagactgacgctctacaagacgtgcaagcttttgtagacaatagatgttggatccctcaggaggctactgatgatcaaattctcaaggagctttataagctaatgacgatgcagacgagggtattcgttgtccacatgccaccaactctcggttttcggttttttcagaaagctagagagattggtatgatggaggaaggatatgtatggttattgacagatggagtgatgaatttgttgaaatctaatgaacgcggtagcagcttggagaatatgcaaggggttttgggtgtaaggagccatatccccaaatcgaagaagctcaaaaatttcagattgagatgggaaaaaatgtttcctaagaaggggaatgatgaagagatgaacatttttgcgttaagggcatatgattcgatcactgccttggcaatggccgtggagaaaaccaatataaagagcttgcggtatgatcatccgatcgcttcaggaaataataagacaaatttggggacattaggggtctctcgctacggtccaagtcttcttaaggctctttcgaatgtaagattcaatggtttagccggagagtttgagctcattaacgggcagctagaatcatcagtgtttgacgtcatcaatattattggaagtgaagagagaattattggattatggagaccaagcaatggaattgttaatgcaaa

SEQ ID NO: 192140 - DNA, 158 bp, Arabidopsis thaliana landsberg
attctacctttgcatgtgcaagcaacctatcacggaaatacaacataataaatgataagataagtccgaagaagaaaaaatcacagagacagaacagtgactgtgagaatctcaataaaaatagaaaggaagaatggctgagtatgaacttcttatga

SEQ ID NO: 192141 - DNA, 291 bp, Arabidopsis thaliana landsberg
atgctggatgcggtctgcggcatccttctcttcacgtgggtgaaccacggctggccgggactgctcggcctggtgctgctcgtcgccgccgtcctggtgacggtgcgcgtggcatgaccgaagtcgttccggaggctcgtcgccggcccggtgcgggatcgtcgacggtggtggttctaccggcaccgctggcatgcggccataacgctggccgggctcgcgcccatgtaccgggcacgggtcctggtcaccgttctcgtcgacgtgcgggcatcccgtgcgacagacctg

SEQ ID NO: 192142 - DNA, 1111 bp, Arabidopsis thaliana landsberg
atggagttggcttccgagcttttgagctgtggtgcaacagtatatgctgtagttctgagcagaaggggtggattattgcaagagctcacaaggagaaggatcaaagtggtcgaagataaaggagaactcagcttcaaaactgccatgaaagcagatcttgtcattgcaggatcagccgtctgtgcttcatggataggtaaggaaaagtagatctgctgattctttgacatcactatttgctgactatcatgtttagaaatgcgtaccatagctcattcgtccttcagctatattactggaaaacgcattttataatagaaattgtcatatatagcatactcactttagattgttttctattagtgaaaactttatatgttgttcatcaaaacaattgttaaaacatgttcaatatgcctttctgcctcaagttgggatactcattatgatgtttgttactatctccgcagatcaatacatggatcaccatccagctggtggaagtcaaatcgcttggtgggtgatggagaaccggcgagagtactttgatcgagcaaaacctgtgcttgaccgagtgaaattgctaatttttctatctgaagtacagagcaaacaatggttaacatggtgtgaagaggaccatataaagcttagatctcagccagttattgttccgctgtctgttaatgatgagttagcttttgttgctggggtatcctcttcactaaatactccaacactgacccaggagattatgaaggagaaaagacaaaagctacgtgaatcagtcagaacagagttcggtttgactgataaggatatgcttgtgatgtctcttagcagcataaacccgggaaagggacaacttcttctacttgaatctgtcgccttggcactggagagagaacaaacacaagagcaagtagctaaacgtaatcagtccaaaataatcaagaacctcaatggcatcaggaaagaaaagattagtctttctgccagacatcgtttgagaggtgcatcacgaaagatgaaaatcacgtctcctgctgttgacaatcatccatcagttctctctgccaccggtagaagaaagctgctgttgtctgacaac

SEQ ID NO: 192143 - DNA, 57 bp, Arabidopsis thaliana landsberg
ccgagagatgattcaactgtgctctgctttttcctttacttgtcaacttcttccaac

SEQ ID NO: 192144 - DNA, 654 bp, Arabidopsis thaliana landsberg
tacctagatgtggctcaaatggaagaagctaagcctctatgtaatgctaacgatgatctcaacaaacaaattccctcaacagaagaaatgacaaactcggagcatgtagctgatcaaaacctacctccttcaaacactcgagtggaagaacttcaagacaatgagcagaaggattcctcgtccttagaaccggaaaaatctacaaaaccacagttcaaaaatgtggttgctatagtcgatccacctcgctctggacttcatccagctgtaatcaaagctctaagaacccatccccggttaaagagacttgtgttagtcccttctctaaacactcactaccacaaacttggttacttcgtctctgtttcctctgtttaacacagttgcccatctttgctttgatgcaggtacatttcgtgcaaccctgaaacgctagttgcaaacgcgatagagctttgcacgccatcttttgatgaaccggatagaggaaacaaaaattacagagggcgcaagaaaataggcattgccgctttggctcgacatagagccaagtcaatgccaacttctgaggcttttagacctgtcaaagccatggccgttgacctttttccccatacagaccactgcgaaatggtaatgctccttgagaggtaa

SEQ ID NO: 192145 - DNA, 111 bp, Arabidopsis thaliana landsberg
aaatctcctcagatgcttccgaatcttcaattcctctcacggaaaccaccactccactgtcctgctcatcttcttcttcttcgtcttcgtattcgtattcttctgcgctga

SEQ ID NO: 192146 - DNA, 1101 bp, Arabidopsis thaliana landsberg
atgcacaatcttccaagcagattcaacgaagatctgatcaagagctgtgaggcatacatcgaattacgaaacaaatgtaagtaccttattaactctggcttcggtccacgtatcttggaggaagatcataaccataccactcgagtcttaaccatcgagaccggttcttggtactacacaaaccaattcatgcttgaggttatcttccgagagaaaatgagacactacgagtgtttgaccaacgattcttccctttcttccgtggttttcgtcccgttttatgctggattcgatgtgagacgcttttggggatacaacgttaagctgagagacgaacttggtgaagatctagctcaatggcttagggagagaccagagtggaggaaaatgtatggacgagatcatttctttgtcacgggacgggttggtagagatttcaggagggttacagatcaagattcggattggggaaacaaactgatgcggttgcctgaattcgagaacataactatgttatccattgagacaaattctaggagtaacgagtttgcggttccttatccaacttatttccatccaaagagccgaaccgaggttaagagatggcagaggcaagtgacgatgatgcagagcgtatacttgttctcgtatgtcggagctaatcggccaaaaatggaggaatctattagaggtgagattataagacagtgccttgcatcacaaggaagatgcaaatttcttgattgtgacacatcgagtaaagactgtagtgatccggttaaggtagtggaagtttttcaagattcggttttctgtttacaaccaccaggagatacacctactcggagatcaacatttgattcgattttagccggttgtataccggttttctttagcgttgattcggtctataaccagtacaagtggtattttccaaaagatcgtaccaagtactcggtttacatctcggaggaaggtgtgaaaaatgggaaggttagtattgagaagttattggctagtgttactgaagagaagatttcaaggatgagaaatgaggttgagaagattataccaaagataatttatacaaaaccgggggag

SEQ ID NO: 192147 - DNA, 120 bp, Arabidopsis thaliana landsberg
atggtacagtatcccgatgggattgccagctcagtaagctcgccgccggtgatccacgcgtccggatttgcactggtcaccgtgattcatgcttggcacgcagaggatatccatgagaag

SEQ ID NO: 192148 - DNA, 139 bp, Arabidopsis thaliana landsberg
ggtacttctcatggaactagtaccagccatcaagctattatatgaagatgatcatcacattcccagttggttcacgaaagtattcatcgacaaagactcattcgaaaaagccattaacaaaaccatggaccttaactag

SEQ ID NO: 192149 - DNA, 214 bp, Arabidopsis thaliana landsberg
aaatcagagaaaaggcattttaaactatatataaagcggagttcgggtaaggaggatttgaaaatcattcagttattcgatgctctggataaattgcccgaatacgacgaaaaagtactgctgaaaaagcttccgggagttaccaagcctcaattagccaatttaaaaacgcatttatacaagcagcttttggcaagcctgaggctgcttaaaa

SEQ ID NO: 192150 - DNA, 304 bp, Arabidopsis thaliana landsberg
gtggagtataccttctggaggttcaccgtatcttaaggcctggtggcttctgggtcttatctggtccaccggtaaactatgagaaccgttggaaaggttgggacacaaccattgaagagcagagatcaaactacgagaagctgcaggaattgctatcttcaatgtgcttcaaaatgtatgccaagaaagacgatatcgcagtctggcaaaaatctccagacaatctatgctataacaagttgcctaacgaccctgatgcatacccgacaaaatgtgacgacagccttgagccagattctgcttg

SEQ ID NO: 192151 - DNA, 434 bp, Arabidopsis thaliana landsberg
tttaacctctgcttccctggctacttcaactggtctgactttgttattgcatttacctggttattttgggaacttaatagtgtttattccatgattaatattctaggtgccatggatccaagtgagcaggtcaagatcactgctactatccgttcaacctaaggttttccttgcagcagttggcattggaatgtacgcattcttcttttaacatatagaaaagataccaagtgaagaagctcatggaaatatttggcttgtgtgttagaaatgcggattacgtttgacagaagattcttacgtcttcttacagattgctgcatctttctctactagcattcaatgctgtttcaatccgcatcctctccggtcttacaggtggtagcaagagctccaaggaaaacagcactgcagttttgctcatttcaagccag

SEQ ID NO: 192152 - DNA, 1652 bp, Arabidopsis thaliana landsberg
atgttcgtgaagaagttggtcgagatagcagccaagaaggtacacaacgatccgataatatgatttcttctttctaatcttcttcggctattgggtttatgagagattcagtgaacaatgatggttcaaaagtgtgattcgattcgaaatcctttaagtttacctaaatcgatgttagatccatttcttagaataatatttgtttttttctcccctgtgtcttattattttatagattcacagaattaatgtaacattaggatatgatttgattgattaatttttgtcggattattacacggatctattacttgtgaatgtgactgtgatgactctgtgtcggttcctggttagcccagatgtttaatccagtttgattagaaaaaaaaagtaatgatgacgtaagacgaattttgttgccaacgcatgtttcgtgtcctaaattttgaaatgttcaattaaaattcgcatccataatgctgtctatttatatttctaatcaccaattatcttttgacttttgtacttgtccatatatacattaagaccaaaaccggccggtttagtatagtccaaccgaaccggccactctatttataattttctagccagaacaaaatcttcaaagtcttaccatttcctccaatgttgtagcctggaggaagttcatcagaaggactgagagctaatgacgttgagccacgtatcgctctgcattacggaatcccttcaggttctcacttgtttgcttatgatccatttcagaagatcctcgccgtttccaccaagtaagagttttttattttatttttaaaagaagctttttataaattgtttcttgtgtattcataccaatttttggttcttggttctcagggatggtagaatcaagttgtttgggaaagatcagacccaggctttgctagtctctgaagaaacatccacaagcaggtttcttgaggtgtcacttcattatctctttcttctttctttctcttgtttctgtgtctgtgttacaatcacatagccgtgacaacaatttctccctctattgtcttgaattatccagtttgttcagaaccaaggaatccttctcaatgtgaattccaagaaccagattgaggtaagagatttcttgattcgactcaagtagtagagtagtagcctctgagctttggtctgaaagctaaatttctaataggtttgggacttagacaagaagcttctatctcatgttcatgttttcaatggcgagatcacttctttccgggttatgcaacataccccttacttgtatgtttcacttctcaatcttcatttggtactatttttgcatagtttcttgatttgctgataatgaaaacaagggtcatatttgattggcagttatgttggagattcttctggtaatgtatcagtgtttaagatcgaacaagattctaatcaagttatacaactggagtacaccataccttacctagcatcaaatggtaattaatcaaataccaaaaagagcttcttcggtttaccttttacatggatcgaatcgcctatcttgaaacatcttgttgttgcctaggctctcccattgaagcttctgaggatacttcagttgtgagcattctaccacagctaacagctgaaagcaagag

SEQ ID NO: 192153 - DNA, 393 bp, Arabidopsis thaliana landsberg
atggccgcagcagtcgcagaggcggcgccaggcgtgggatttaccgcacgcgtaaccgcagggtcattggcgacagcagttgccgcagcgacccccgccgaagcattgacaaacgccaacgcagtaacggtaggcgaaatcgcagtgaccgtagcagcagcagcacccggagaggcgttggacgtgttggtcagcgtaggcgccagcgccgcagctgtcgcagtggccacgccagccgaagcgttcgtgagtgctgccgtgctgacggtcggtccgtttgcagtagctggtgcagtagccacgccagcccgaaggctagccgtaagcgtcagcgtcggggcattggcagcacccgttgaagtagcaagagccgccgcgggatgggccgccagg

SEQ ID NO: 192154 - DNA, 158 bp, Arabidopsis thaliana landsberg
gatggataaacaagtccttaaaatctttagacatagtatacggactgtcggataaggattgtcggataaggatggactcacaatccggagaagacgtgggcctcacaaagaagggactgaggcgttacaacattagtcttacggttcccactccataa

SEQ ID NO: 192155 - DNA, 527 bp, Arabidopsis thaliana landsberg
ctgacaaggctcttttcaaagtttttcaaacttccccgccggaagatttcatattacctgcagcattagttgatctacttatgggtgtcggcaaagcagacctcgctgattgtatgccgaggcggattatgtgtacatgccgttcaattttgataaaaaaacattgggtggcattgggtgttgatctcaaagcgcacaagatcactattctcgattcaaacattcagctccgcaaagacacatcgatatatgccgagctccagccgctggctgctatgcttccttacctcttcaaacaggcaaactcgtctagggctcctatcatgctacaccctttcccgattgaccgcctgcatggtatccctcaggtcacctcgccttttgattcaggcgttgtctcggtgtttctcatacacgctcatgccgccggtgggatcgaggagtgcgtggaatttgatgtagctgcctttaatcaagaagttaaaaaacttgtctcgataataatacttgttggggttgcgtcataa

SEQ ID NO: 192156 - DNA, 221 bp, Arabidopsis thaliana landsberg
  unsure (1)..(221): unsure at all n locations
atgnnnnnnnnnnnnnnnnnnnnnnnnnnnnnnnnnnagagcgatgcttcgtcagtcgcgagcaatctccatgatgatgagattatcccttggttcttttcaagagaagagatcgaaagaaactcaccgtcaaggcgagatggcattgatttaaagactgaaactcgcctacgcaactcatactgcacatttttggaaaaactcggcgaaagattgaaact

SEQ ID NO: 192157 - DNA, 1143 bp, Arabidopsis thaliana landsberg
  unsure (1)..(1143): unsure at all n locations
ttcttgcttttctgcatccaagccttctttgcgcttgtgcgatactgcttccactccgctcgccagcaagattgagatggcgcccaagcggaaagcatcaagttcatccgttgctgtcattcctcccatcgatcctaacagccagttgcctttcgcaggtaaccatatgtctgttgtttctgagtctgatcttctccatctcgtgtccatcggagttcttcctccgaannnnnnnnnnnnnnnnnnnnnnnnnnnggggtcactgttccaacagaggatacctacgaatccgtgatttatgttccttttcttctccgcagtctcgctcttcctatttctccctttttccgcggtctccttgatttctatcgccttaatttgacccatctgaatcccaattccattctgcaaatttctatttacgttcatttatgcgaacttgttcttggcgtcctgccacattttggactatggaagtacttgtatcactgtcgccctgggatggccggggggtagcatcagctggtggggggtgcgagtttggagatgcgccgtgggaggaagactgactatcttgaaatcccgctcaaggatagtatcaagggatggcgcttggagtggtttattgttgagaacacggaaattctctcccccacggtcagggagacagccggatgttcgtactccgagttggaccgagtccccacggaccaggaggtggctgaggcaggggttttgttagcagaagttggattgttgaaagaaaggggtctgactgcagaagttgtggtcgctgactttgttttcaagaacattcagccactgaaagatagagcatatccggcttatctgtaccgaggcttggctgactcaacccgggtaaccaacagaagagttcctgctgtggacttggtgagccggctcgagatgatactcagaggcaaggtgtcgaacgtcggcgctcctgtcgcatactcggcctgaaatttgcctccctcccagacttttactagtttcgtgtcaaatcctcctgctggtgataagggtttgggtcttagagtgcgaccctctcccgaagaagttagtactttggttgcctcgctcggagaaattcttgacgacgagaggcgggttcattttgag

SEQ ID NO: 192158 - DNA, 470 bp, Arabidopsis thaliana landsberg
  unsure (1)..(470): unsure at all n locations
atgcagcttcccgaatctatgaagcatagtcaagcggttttgtatctagaaacatatcaagttttggacttagaaatgagtcgtttacgcgaaattcaaagatggcaatcgtcggcttcagctaaagtgcggtgtatatccttcctcgtccaactcgttttatataaattcctgtnnnnnnnnnnnnnnnnnnatattctctgtctgtgcagttagctgctgacatgcagcggttttccagacctgaacggcggatcaatggtcccacagtcacacatctttggtgggttataactcttattttatgttttgtattagatccttggatgattaactttcctcgtgtatatagtgtaactgtgattttacttaatataggtcaatgctaaagttgcttgacgtcttggttcagctggatcatcttaaaaatgctaaagctagcattcctaatgatttctcttggttaagag

SEQ ID NO: 192159 - DNA, 1993 bp, Arabidopsis thaliana landsberg
atggacgtgaaagccaaggtgcgttgtgattctcatttatttgttgcatttcagcagtttataccaaacatgcgtaatgggaaatagttttctaatttaaacattctagaaattgtgagaaaatgcactatagaacatattttgccatgatagctcttagctggtatccaaaaaggtcaaggggcattccgagaatcgaaccccggccctctcgcacccaaagcgagaatcataccactagaccaggggccctgttgttttgtatacaattgaagcattatacctgcagtactacaagcataatattgagatctgtttgaatctactgtatgagtttagtgtgattcttcgttgcttttgtaagtcagatttcctgctgaatctaatgcaatatctataaatgaaattcgataggagttaacttcatgccgtaaaatcatgcatcttgcatttctcttgttgtaagctctatgccaaaggttttctgttgtatgtcaagctatctattccttttatcaagtgacagagagatgcataagcataactatccttttctggagagtgttactttcttatctgcccttggttctctaatgcagcatctctctagtgtaatttctgtcacaggaattcttactgacaaaaaacaccttttcctgaggaagtggaagatgcgtttaatgcacccttgaatatgttcctcccatttccttgtcaaaggtagttgtgtttttatttcctctgaaagcatcagtaccttaaacgtacttgtccaggatgataaatgcatatctcaggagagactagagcggtgaaaagtatttgatccaattctttagcttgcgttcaggagataaggattagttattgtattatagttgccggaatctgatcagagccacatctgttatttatcaaaataccatctgctttcattgagcagggcctatgttatttgtatccaacaattttcgtttgtaaactggccaagttggcattccgtgaatcaaactcggggttctctcgcactgtcatttatatcttgttaggttaatgcattttatttgggtttccaccagctccgaaatttttttgtcgacctggtttagtcgctcaaagtgtagtaagtttcctagtgaactgaatttaatttatatgtgatatgttcatggccgaccattggaatgtacctgaggtggctcagtggttaaagaagttcatgtaatgtttttagtactcttgttttgctttgtaggctatatggtggagcttgaagctgaagttgcaaagatagaaagaagagaggaaaagttactaaggaagccggtaatgaccgaccacaaagacatctgctcatatgttacattcatctctgttagttttagagtgtatctcttctcgtgttttgcaggcaatatgtaggaattacagaagaatcaggtagctcttattccatcttacactatttttctaccatacaaaactttatttaaacggcttatgcgacttaaacctgtcgtagtttctactggtggaaattacctgcaacctgagaattgaatcctccccatttagaatgtctttgggtaaagatctgctcgtaatgagttcatagatctatgatttaagctttgtttgacaccaagaaatccgctcttaccctctaaagtgcactttgtttgacaccaaaactgctctcaccaatcttattgtacgcaacttcaacgcttacagcttattaactccatcgttttttggtgggtttatacaacaggagatggagatgatgaatcttcaaggaagccaacataaaagctgtggaagatactgtcaaatatagatcatgctcatacttggtttctatagataaatcattctaattataatgtttagttgaactgtgttctcatcttttatcaaattgtaacctctctctctatacatatatacaggatcatcagaatctctttgcttagatattgctaaagcttaa

SEQ ID NO: 192160 - DNA, 143 bp, Arabidopsis thaliana landsberg
atgcacataaatgcttccaaccacgcaaatgcgtttaacgttataatccgaccacataaaccagccaaacttggaacaacggtcactttgaccctcataaatcaagcaatttcgacaccaaaatctatcattcctcttaacaa

SEQ ID NO: 192161 - DNA, 321 bp, Arabidopsis thaliana landsberg
atgttactgattcgaacagcgacggtcgctcttcttctaatcgcgtttcttgaaaacgctgcggctctgaaaagacaacaaagtattgttaagtatcacggtgccgttgctacagacgatggacggtgttctgaaatcggcttgagcgttctacgtgaaggaggaaatgcggttgatgcgtcagtcgctgctgctctatgtttgggcgttgtgagtccagcctctagcggtataggcggtggagcctttatgctggtcaaaatagctggaaaggaggtcgcttacgattccagagaaaccgccccgcttcttgcaagtgag

SEQ ID NO: 192162 - DNA, 54 bp, Arabidopsis thaliana landsberg
atgggcaactgcggcacacgggaggagaatgccgtcgtcagccgcacgcgcaag

SEQ ID NO: 192163 - DNA, 139 bp, Arabidopsis thaliana landsberg
atgaagattgtgaaatataaagtccctctcaaggtaaagtgcatcgccgagcaacataacacccatagcgacggcaatgacaatagacagcggcttgaacaaggatatgtagactggacccttaagatgcagaccccaa

SEQ ID NO: 192164 - DNA, 99 bp, Arabidopsis thaliana landsberg
aacggtgttgaaaaagattgtaaactcagtttgttcgtagacttcagcaggaaccggtgcaagggcgagtcgcccttacaagtgtgcctcgatgtttaa

SEQ ID NO: 192165 - DNA, 111 bp, Arabidopsis thaliana landsberg
atggttttggctgacaatgtggatggcggagacgatcttgatcttattgttactactatgaacggcaacgtctttagcttttccactccctcaccacaccatccactcaag

SEQ ID NO: 192166 - DNA, 2178 bp, Arabidopsis thaliana landsberg
atgaatgcatatgaatgcaatgcatatgtcctctgcattcatacctctaagggtatgaagtcgcatcgtacccctcctcgggcaacgtacgatgctaagttgtaccggtacggtcggaccataggtcacgacccaacttcagatgcaagtgaatcatgcaatgtatatggcatgctgcatttatcaatatactttacttccttcacatacaatacaacctcaaataatacttcatttaccttcagatacaataccaacctcaaataatacttcatttaccttcaggggtgtgaattaatctcatgggtcatacttgaaccataatcatcatcaataaatgatagagcatcaacacaatacaatcaagtaaaacatcatcatagagttcatttatgatagaatccaataattctgaatattagagtgtaggtgatagagataacaggtcaaaacggtagcaaccaccgctacattcacttgccttcatcgaagaagaaaaatgtactaggcatgatctgtagtgtagccactgctagcgggcataaaacttagtacaaatatttacaaacatttgccaacaatcaacaaaacactcctacacttgaaaccaagacccagtggaaagactccaccctgaaccacatgccatacagtagcaacacgtgtttgttaattttgtatctttacaattaaaacaatggtgatatcaaacaaatactctaggagtatctacacacaacactctataacttcggtattcaatggataattaaattctgtcatcaataagttctaaaacatctgacaagataaccgactgaatctgttttagacagcagcctagttaacatcaaaattcgatatctcccaaactactgaaccaaaaattatgaaattctgctggcagtaataaattttatccctctacaaaagtctccatagttggaagagccaattcggccatttactagatgaaacccaccagtgaacagaaccgctaatttttgtcaagcaaacaggaacagccacagtaaaacaaacataactggagtttcataaatcatattgtcgggtaccgtaaataggggtacccccaacactcctaaacacagctggtaaccaccatcagcacaagctgaagagattgatgggcacgattcaggtaaaggcttcgtctactcatgggacgcgatctcgcctcgcccgagcccagcctcgggcggaaacagaagtcccagacgaattctcgcttcgcccgagggcctcctcaagcaacgggcgcaccctcgactcacccgaaccccagctcgggcgggcttcgttgtgaagcaaccttggccaaatcgcctcaccaaccgaccgtatcgcaggcgcattcaatgcgaggatcgcctgacaccttatcctgacacacgtgcctcagtcggcaaggtcgaagtgaccgtagtcacttcgcccttctactgaccgacctaacaagaaaatagcgccgctcgcccctctccgactgctgtgccactcgacagagtgaggctgacaacagctaagtccagccttggcaccataggaagctccgcctcgcccgaccctagggctcggacatagcctcagctccgaaagacgacgaactccgcctcgcccgaccttagggctcggactcagcctcggctccagaagacgatggactctgcctcgcccgaccccagggctcggactcaacctcgacctcggaagacagtctctgcctcgcccgaccccagggctcgggctcaacctcgacgctggacgacggactccgcctcgcccgaccccagggctcggacacagcctcggcctcggaagacggtctccgcctcgcccgaccctagggctcggactcaacctcgaccttggaggaatcgccacctcgcccaaactcgggtccggaccggccacgtcgccagggggccatcattaccctgcccctagctagctcaggctacggggaacaagaccagcgtcccatctggctcgccccagtaaacaagtaatgatgacaccccgcacgctccatgacgacggcagctcccagccccttacgtcagcaaggagatgtcagcaaggatccgacaaccccgacagctgtacttccgcaaggctctagctctcctccgatggccacgacatcacatgaacagg

SEQ ID NO: 192167 - DNA, 795 bp, Arabidopsis thaliana landsberg
atgatgaaattattctctatttttgtcgtatttatgcaaatccaagtagcattgtcgtctcaaccaattcggtatgctacggaacctaagcccatacaagaactctgcaaatttaacattaatccaagcctctgcgtctctactctcaatcttgatcctagaagcaagaactcaaatttacgaggtgagtaaaaaaatcttagattacgttttttttttcttcttccagaaggataatctaccaacaatttcaaaaactaaacagaaaacatgaacaataaatcgtgaaaaaaggaaaactgacgaaatgactttgctatttgacatgtttaacgcaaattttaatcggtgaagttgttgttaccagaaaaaaaaatgtttaagcaaatttagtcattgtcaaaatactaaaatgtatatttgtttattttttctttcatgatagagcttgcgtcgatctctatcgatgcgacttcaaacaaagtcaacaaaatgttaaactatctcatctccgtctctaagaacatcaaagaccgtgaagacttaaagaagtacaaaacatgcattgttgagtatggcacggcgtctcgtaggtttttaccggcggcgttggatgatcttaaagctgggttcttttctctagcgaagtctgatatggaaagtgttgtgtcgatagccgatcattgtgaggcgcaattcgctgggagttcaccgttgacgggacgtaacaaagccactcatgatatcgctaatatgactgctgacatcataagatatctttttggcaataattaa

SEQ ID NO: 192168 - DNA, 40 bp, Arabidopsis thaliana landsberg
atgggggaaaggcttttggtttatgagtacatgccgcacg

SEQ ID NO: 192169 - DNA, 479 bp, Arabidopsis thaliana landsberg
tgtcaatttttggacaaccatccgacagcacctgttttctctaactacgtcatcagtaagtacaatttgagaaatggagcattttctaaggaagaacatgataggatactgattcctgctgtttccaagtaagaacccttcaacgattatccttacttgattttgtttctctttgtttgtttgctcacatgcatgttgcttccattcttgaaactttgtaaaaatataggcatggctatggtagatgggtggccatcgttgaagacgaagagatagggttccaagaggttgcctgcaaagacctgaatatgcctttccctcctgatactaaatctgctcgtaaaagaatttgtgaccatgtgggaaaacgggttaagaagatggaggatgccataaagtatgagtacgcattacgtaatattttgcgccgactcagaaattttaatcttttgtcttctcatgctactactacattgtga

SEQ ID NO: 192170 - DNA, 281 bp, Arabidopsis thaliana landsberg
gtggctttatcatcattattttgcaatggctatgtcccttgtcagtctcacttgggaaatcaaaggtcaaccaaactgcgttcagaagcaggtattgggtattaacttattatcatacatgcagagtaaaatctatccaacaaatgttatagattattctaaatctattgcagaaaggagtgcgtcttttcctccaatgggctatgatgcaaggtgtcgcgatgcttctgcaaaatagatatcagcgccaaagattatacactcgcattgcacttggaaag

SEQ ID NO: 192171 - DNA, 174 bp, Arabidopsis thaliana landsberg
aattgtgcagatggtgagaaagatacaggtcaactggagagagaaaaggtagaaccaagagcacctcctcatttttcatcaggttcgagttcttcctttggagagccggttggtccagagccggttagcccagaattggttgactcagatacactaaatacctcaaatgttgag

SEQ ID NO: 192172 - DNA, 163 bp, Arabidopsis thaliana landsberg
gactaaggaacgaatccagaagcgtcacgtatggttggtgaccgcccgagacgaatcctgccaaagatcacccaaggccaggcccgaccgcagaagactgcccctcgcgaccacgggacttaaaggctttgcaacccgtatcgcgaccgcgagttgggattag

SEQ ID NO: 192173 - DNA, 297 bp, Arabidopsis thaliana landsberg
ccgagcgatcgccgccttggtgaatgccaccgccgataatacccgcttccttagggaaatggcgggtcagcagcaattccaacagcaagcagcaagaggttatccgcaaggtcctcgtgagaccacttatctggatttctcggaaactcgtccacctctattcgtcaaagcagaagatcccctagaagctgacgaatggattcgggttatcgagcaaaagtttggtcttctccgttgctcagaaacacagaagccgttgttcgccgcacaacaactccgtggtcctgccagtacctg

SEQ ID NO: 192174 - DNA, 285 bp, Arabidopsis thaliana landsberg
ctgctaagtcctctggggccgcatctgacgaagctttttcagaagaaacaagaaccttcggctacaaagaaggcagatgggctgaagaagggaaggattggtagcgtgatgcaagctattgaaaagacgcctccttcggcctcggtatctaagatagcacctactgcaagtactgaggccgctgccgaagctgcagctgccaccgaagctaccaacctatctgccaaagctgcaactgccaccgaagctaccaacctggatgctaccttgtttgggaatcattaa

SEQ ID NO: 192175 - DNA, 221 bp, Arabidopsis thaliana landsberg
cagctacaagaacatttggcatctgtgcctcgtactgctgtggcaagccagaagatcgatgtgaaaccgctcaatacccacaggctcagtttctctctagaggaagtgggaaaatcccagtgctcgtggtcgtggaagtgatgctatcaaggttaataagatgcttcggaaactctgttaataccatcattgtggacattctcttcaacattcgaccctga

SEQ ID NO: 192176 - DNA, 95 bp, Arabidopsis thaliana landsberg
gagaggagcagatggagttcgccatgtggcagccatgtggacacgtggagctcgtgccctggcacgcgcagcgtcctcctcgcgtgcacgcctag

SEQ ID NO: 192177 - DNA, 790 bp, Arabidopsis thaliana landsberg
atgagggagacgatggaaaatcgctacaacaacgaggaggaggctctggaggtaccggatctggaggcaccggaggcttgggaggatccagcgatacccgaaagaacagcatccggaggtgagcggtgttcacagtccaaacggaggagctcgacgacgggagagttgagaacgaagcaaccatcagagctgaattactagccaaagactactcgcaggcgacaacgggttccgacgaacgacgaggatctgacccgagaaggaagagcagagcggcttcagaaggaagaggataattgagcggcggagcagcggcggcggaggtccatcttgtcttggagcatggaggggcggcttcctcggagatcgtgcccgggagagaagacctagggcgaactctctttggttaatatttaagatcgcctcgttcttattgttttgcgactttgtcaatgactagagaagcgcaacaactttgtatatttgctgctcagagctctgaggtatggatagcgaataagatggagagtacgaagccatttcatagagcaagttcctgacagtgtcgaaatttgatgaccgctatcatttagggttatgttttgggttgagtttcttagtcgacatagagaacaaagttgtagtgtcttgtaatcaccccgggttctccaacaacgttttacaaattgtgggaaaggataaatacctacctgaggatcaacatggtgctgaatctcctacccctccacgtctcctcatttatgttctaggtttggtcaaatccagcaag

SEQ ID NO: 192178 - DNA, 106 bp, Arabidopsis thaliana landsberg
atgctagttgagactgatggcttagatgatatccggccagattatgaggcaaccttagctatatgctcaaaggacgaaccattttccgtctcagttgcttgtaaag

SEQ ID NO: 192179 - DNA, 77 bp, Arabidopsis thaliana landsberg
tcgtcttctcggctgctgggatcggcgttcgtctccttcgtctgtccgcggcgttcgggtctggtcggttcgcctaa

SEQ ID NO: 192180 - DNA, 337 bp, Arabidopsis thaliana landsberg
caatgccgataatgctgcattgaaatgcactactgttcttccgagcaacaacgaatggaaccagaccctgatccaaggcggccgcaccgactggaacatcagcaagacgctggccgacaagatgaatgcattgggtgatacccgcattgccgtgtacgctaatcccaacaaggacggcctgtaccagggccacgccaacggccttcccgatgcgattgctaccggctacctggctaccagctcgactattggaaaagcattcaccgacgcggcagcccctgaggtgattatgacctatgccgacctgaacttcatacttgccgaaacagccatctga

SEQ ID NO: 192181 - DNA, 322 bp, Arabidopsis thaliana landsberg
atggtttccacgtgtacgcttttcctccgtacggtttcggacccatttgttccaccggaaacgacgggtggagagaggttcccgccatcttatggtaatcggaaaatgagctgtattgcataaaaatgagtcccacaaagtgtcacgtcatcacgtgaacacaatgcgccgactccaccagattatttcttcccctctccgcaaattatttccattttcgttgattttctatttctttttttagatcacccaattgacggcaactaccttcttaaccacaatttttttctggcagccatcgacttttgtttcgtatttaaaa

SEQ ID NO: 192182 - DNA, 750 bp, Arabidopsis thaliana landsberg
gtgcattatgaaacaaaaattaaagagatttatgaatttcataaaaatgcaggacaacatacaatgcaagggcagctacctatctcgatcctttggagaatatggaaaagccgtaataagctagtgttccaacgaaaacagaacgattggtggagagatatcagagatgctacaaatgaagcggaagaatggatcacaaatggcctatgtgcgcaagttcccactccgagtacgactaatggcacaactaggcagtttcagagtcagtggcaaaaaacacatatgggatggattaagtgtaattacgatggcagctttgtgaatcgagttcgtggctctacggcagcttggataatcagagatgataacggcgtgttcaaaggggctgctcaagcgacaggtgcgaccgtttcctcagcctttgaagcagaatgtcaaagcctaattcttaccatgcaacaattatggataagaggctttagaaaagtaatacttgaaggcgactgcaagctcctagtcaatgttctgaatggaagaggctcaagatttgatgctatcaattggatccatgaaatcaaagtttggagaaataagtttgacgcaatcaagttcacgtggtcacacagatcaacaaatcaacctgctgatattttagcgaaaaaccagagacatgctctgtcttcatacatagttcatagctttatcccattgtgtatctcaaatgctctgttttcagactacgtttcctaa

SEQ ID NO: 192183 - DNA, 128 bp, Arabidopsis thaliana landsberg
atgaacaaatatgcatatatacacataggatctatcaatctatttgtttggttgctgatgagtagtgaaagagagaaagacagtgaaggagaaaggggaaaaattaaagatgccaaatttggtcacat

SEQ ID NO: 192184 - DNA, 165 bp, Arabidopsis thaliana landsberg
atggtaggagacatcgccacgagatggaaagaattgagcggtagtagcaagtggaaagacctgcttgatcctcttgacttggatctacgccgttatatcctacactatggtgatatggctgaaaaagggtacctagcctttaatagtgaccgccggtctaaatat

SEQ ID NO: 192185 - DNA, 272 bp, Arabidopsis thaliana landsberg
atgcatcccaaatgcttggaccacgaccatcttggtgggtctcgccttcgacctggtaagctgacgtggcggttccgaacaagaatcctttcggaaaactctttctgttaagaccgccggtggccaatgggacggcgactcttcgccggagcgggaagcagagaggaggaggagaaaaagaaacatgtgaagctcactatgggacagaatgtggggactggggagtgaattatgaacgaggatcaatgcgtgtcttcttgcttcaggcttag

SEQ ID NO: 192186 - DNA, 1514 bp, Arabidopsis thaliana landsberg
atggaaaagttggtgaaggaaggcccaactctgctgcaactgcacaagtgggaaccttctcaatttcaactcaagctatcagaatttcgcgaggcgtttatttctccgtcgaggcagttgttattactactctcttaccactccgaagctttactgcttcctttggttgcaggtaataacttgtttctttcttattcatatgtgtatgtatatgcgtatcattttattagcgttgttcgctgttatcagggaggtccattggcagtgaggtttcgttaagtggtgataatgaagagttgaatagtccttcatgctctggtgggtcagatccagagaaaattgaatctccttgtggatcaggagttggttctggtgagcctggttttgtagataattgcagttctagttgcaatagtttcccttttatctttgatgcaaagtctgttgcttggggtagttgtggggatacttacaatcggcacaaagatcctttgtttagggaattgttgtttgtatctggaaatcatggtgttacggtccacgctttttgctgtacaaaagatttaagtgacaaagccaaaggcaaaccaaatggtgagctgaggcatggggagtgggttgagtggggaccttctaggcttagtcagaaatcagaaccggaaagagtctcttcttctgatggctcaaagcagtggatgcaatcttttttgattgatttggaaactactgtaattgatggtacaagacagtcgaggttccctgagaagtcagcgtttccgggttctgcagaggttgtttcattcagcatattaaatactgatttacctttctcgaatcttcttttccaagacaactccatacttccgaaggataatatgcctgaggatggtaatgtaaatgacaataattttctcgtagcatctgatccaactgctttggatgaaaaatctcgagctgatatgcccgtaaacaatgtcagtgtaaacagtttgtacaggtgcatcaaagttttctccagcgatgctcattctctgattggatttgttatggagttatcggattgtgcatctacgcctagaaggaatgaaaacgaaagaagcaagggtaagagaaatatctttgttgccaagctgtttagctgggggatagaatgggtctcccttgtgaagtttggtgagtcaagtattggacctacaaatgagtgggcagatttccggctatccgataactttgttatctgcctcagtgtttctggtttgatctttctatatgatgtgaattctggggattttatttctcatggggatatcttacagacatgcggtcgtggattgcattcttcatcagataggcaagaagcaactgcagaagcagatcagctaagtgactttcaaaatcgtgctccatccatgtctaagacttgtattgttggttccacggacagaagaaagtttagaaagcttattgtagcttctcatacaccactcatagctgcagttgacgaaaatggtttg

SEQ ID NO: 192187 - DNA, 61 bp, Arabidopsis thaliana landsberg
agtctccaaagaggaacaaggccgtcacattattgtcaccgttatgagaaattttggctga

SEQ ID NO: 192188 - DNA, 252 bp, Arabidopsis thaliana landsberg
atgaacttttctgctgtttttaatccggatgttactcccgttaatacaacagcctatactgttgatattactgataccaatggatgtataaattccgattctgttgttatttatgtggattcacagataaatgtagcgcaaacagttacgaatctttcctgtaatggaatatgtgacggacagatcagcactgttgtagcaggaggcacatctccttatcagtatatctggacaggcgggaacacaagagct

SEQ ID NO: 192189 - DNA, 1120 bp, Arabidopsis thaliana landsberg
  unsure (1)..(1120): unsure at all n locations
atgagtaagctagtgaagcaggtacaagccacacacttgttaacttagtacacatagagcttatgttaattaatgtctccttttagtttatgttacgcatttttctttcttgcgttttggcagatccgtggtccgctctctaccatgaggactttaagtaaaatgctttcaactcacactaagagaaatcaggtccttgcaattagcatttgtggccggaagtgttattctccctgagtcttgcagttatcggactgacttgggtttttgtacattgtagatttcacatgatattgtggaagacttaatagttcaaggtgatcaaataaaggatacccttgaagaacttcaggatgcagttcactnnnnnnnnnnnnnnnnnnnntttactttgtcccttttggttcttgagagagtcatcactctattttcagttgtctttataaatctgtctttagatgtgttgcgcatgggaaatctgtcaaaccatactcgaatttgatttttcggtttgtatttcttacaagcatttcattttcaggctaatatagtgcgccacaacgaagaagccctaaagaagataaataaaacacacaatgaaacaaggagatcaaagtatgaacataaggaccccattgatggctcacaaatcccaagtacacgcctttccttgggttctggattagatgattcagaaatgcctatgccacctcttgccctggcacccctacaaatgcacagtataaggtacaagtttctgagcaattaacttaacgtcttgccacaaaactcttcacttgaaacaaagtgttgggagggcttatctctttcatttatgtcaggaagaccatgcgacatttctaatgtgcttttagatatggtcgagactgtgagaccactagcacttactcagcaaagagtggtggagctaggtgagaactcagcttccctgcaagttgctgttgaagaaccagctttgaggcaagctctgagcaacctcatcgaaggtgcattgttgcgcactcatgttggggggaaagttgaaattttgtcgaccagagctcctgctggcggtagtcttgtagtaattgatgattatggtcctgatatgctctatatg

SEQ ID NO: 192190 - DNA, 1069 bp, Arabidopsis thaliana landsberg
atgcagcttcttgagagacactttggagctgcaatgagtgaagctggtatgcagcactttgacttggcaaaacagcatgcagatgtagttatagcttgcttgaatgccatcgttgcatacactgagtgggctcctgttccagatcttgccagatatggaattcttagtgggtacgatttttgttcacacccttaagaagattgttatattgatattagccctgcattatttcttgctgatgacgtgctcggatactcataacaggtgcagcttcttactttcttcttctgacttccgtcttcatgcttgtgaggttttcaaactcgtctgctcaaggtatgcaactgggttgtttgatctgatgtgctacgtgagcacgaatagacagctttaatttttgtttgcttttcttgtctgcagaaaaagacccagtgatgcttctactgcagagttcgattctgcaattagcaatttgtttcagattctcacgaatgcctccagagcattgttatgtagatcctccgcaagttcgagcgttatagatagcaatgagtatattcttgatgtatccatgtgtcagagtatggcctccttaggcctcttgctagcttgcacagcatcacttaaaatggtggtgttatggctgtttatcttcagcaggtactgatctcgtatttttaatgtgttattttgatacttaaatggatgttttcagtgaagaaggtggagctattaatttatattggaaaaaaaaaccgctgtctgtgttgcaatggcattctgaaacagaataagtttgagatattattttagttcttgaatgacccgattccaagtgtatactaaattttgaatgcttgctgatatattttgagggatctaagccaattataactttaaaatcgttctattcatgttagcaataatattatgcattagtagtgttttttccccacaaaataatcatgttgtgtttatgttgccttaatcgtttgtattggtatagatgcttggctttttccaacacttcaagttgggccttcacttcgaggcacttctcttttggctg

SEQ ID NO: 192191 - DNA, 130 bp, Arabidopsis thaliana landsberg
tctcatggctcgcggcacgacccgttcggagtgatataccagggcctaacggcccgcttaggctggatcggcttgtctgagtctatggaaaggtgtatcctggtatgtgagagtactgtgatgcacgccg

SEQ ID NO: 192192 - DNA, 82 bp, Arabidopsis thaliana landsberg
cgtgttcctactaaacattaccggaaaaaacgtaattacaaggaatgccattgccacgtcagaaattgctgacgtggattaa

SEQ ID NO: 192193 - DNA, 208 bp, Arabidopsis thaliana landsberg
  unsure (1)..(208): unsure at all n locations
gccgacgtattggaagatttggatggatcgaacaacgggggagcgccaattctggcctttgatctgtacgttggtgagcacagcgacttggatgatctatggtttcttgaccaatcaattctcgatcttttacatcaacttgttcggatttggtgctcacttcatctatctcttaattttcgccgcacacggaccaagagctnaaggc

SEQ ID NO: 192194 - DNA, 106 bp, Arabidopsis thaliana landsberg
gtgcacgtctgacaagggagatagagaaattgccaataacaaagctttcttaaacgcggctatgggtgctttcattgtctcattgagaacccaacttaaattggag

SEQ ID NO: 192195 - DNA, 123 bp, Arabidopsis thaliana landsberg
aaatccgacacgttgttcgaacgcaatgcgcagaatggaagcttctatctccaatctaaggtccatagagctaaggaatgcttagagactgcataccagaagagtacaacaacaagcgcatga

SEQ ID NO: 192196 - DNA, 24 bp, Arabidopsis thaliana landsberg
atgcgcctcatcaagaaacttgac

SEQ ID NO: 192197 - DNA, 115 bp, Arabidopsis thaliana landsberg
atggcggtctcccgagccaagcgcgtacgagttgcaggaggagaaacgcgcccaagcaacgatggccaagcacgatccgtgcgaattgttgagctccacgcgcgtggctgtttcg

SEQ ID NO: 192198 - DNA, 565 bp, Arabidopsis thaliana landsberg
gtttcttgacaaagctgctgttatctcagaatatgaatctaaatccggtgctttttccaacccatggaagctatgtactgtaactcaagtcgaagaagttaagactctgatccgtatgtttccaatctgggcctcggggatcgtctactcggtcctatattcacagatttccactctattcgtgcaacaaggacggtccatgaaccgaataatccgttctttcgagatccctcctgcttcattcggggttttcgacacacttatcgtgctcatatccatcccaatatatgaccgtttcctcgtaccctttgtaagacggttcacagggataccaaaagggttaactgatctgcagcgaatgggcattggtctttttctctctgtcctaagcattgcagctgcagctattgttgagacagtgcggttgcagcttgctcaagactttgttgcaatgagtatattttggcagatccctcagtacatactaatgggaatagcagaggtctttttcttcattggtcgagtcgagtttttctatgacgaatctcctgatgcaatgagaagc

SEQ ID NO: 192199 - DNA, 274 bp, Arabidopsis thaliana landsberg
ggccgtcagtatcgtgtgagcaccaaggaaaccggcttggagcaggccaaggcttttgcagaagactggcttctcggtttgcgcgggaaatcggcggcgggtattttgaagaccgaaaccaccttcgtggaagccgccaagaagttcgagcaggaatatgcggccatcaccgagggggagcgcagccccaaatgggtggagggtcacagcatccgcctgcggctccatctggtgccgttcttcggcaagatgggcgtctcggaaatcaatgccg

SEQ ID NO: 192200 - DNA, 216 bp, Arabidopsis thaliana landsberg
ggcgtccctggcgagccggcctcggcggtcgagagcctggtcgatggctgggcgtggatggcccgcctcgccgtcggtcgttgctcctggcaagtgaccctggtcgccgagcgtctgccgggcaaggtggcattgcctggccactgcgccgagcgccgacgtgcttcggcactggtggccgagctgttcggcctcccggccttggagcctgcccag

SEQ ID NO: 192201 - DNA, 126 bp, Arabidopsis thaliana landsberg
attgatgtgatcatggaaagcacaaaggacatggaatttgatcaagtgcttgtagccgcggaagagcttgaagcagaggagcagcttgaacctgaggagcattttaatcagaaaatgaacttataa

SEQ ID NO: 192202 - DNA, 504 bp, Arabidopsis thaliana landsberg
atgcatttaacatcgacaggactgccaaggcgagtatccccggattgcctcaacagacttccggctctgctcgtccttcagcgatctgttggtacgcaggaaggttgttctatgctggtgtaggagccgacggtttctccgacaaggtttacttcacccagatcatcgagagtgactctcagttcgggagatgctatcagatcaacgatccgacttcggaaaccatcttcgatctccttgatacagacggcggaaccatccttctgcctttgatcgagcaggttgtttccatgagggttctgaatgatgcattgatcatcatcgggactaacggtgtcttctcgatcagaggttcagacaacggtccgttcagagctaccgactactctatcgaatacgtgtcaagcatcggagctacttctgatctgtctgtcgtttcggaagatgacggccttctctggatcaactaccacgcgatgtacgccatgacgaaggatacgaccc

SEQ ID NO: 192203 - DNA, 66 bp, Arabidopsis thaliana landsberg
atgtcagtcacaaacgtcaccgagaagaagtcagtttcgaacgggcagaagcggaacaccaatatc

SEQ ID NO: 192204 - DNA, 570 bp, Arabidopsis thaliana landsberg
atgcgcaacactgatgacaggtactgcagttagcaacatcaatattaactattacaagatgtgaagtatacatgataagcgatggtatttttgttgacgtagttttcctcatttaatacatacctttctctgtcgtgattgtaggaaccgacttttagtttgcatattgaacatatgcaaagacgtattaggccgccttccaaaagttgttggtatagatattgtcgagatggccctttgggcaaaggtttagactataacttattctaactttaaattttggtctaagtctcttatattcgaaagaagcttttgcatgtaattgttattgtcatttttccctcctttcagatatctgagtgctttttcatataagaaagttatctaatttgtgtttctttgtttcataatattggtctaggataacactccagtagtcactactcaaagaagtacagaagatggggagcctgttgctgaatctgtaacagaaagcgccttgaaagttactgttgagaaagaactagtctctcaggccgaggaagaggatatggaggctctcttgggaac

SEQ ID NO: 192205 - DNA, 277 bp, Arabidopsis thaliana landsberg
atgtttgagactgatagagtcaatccagagcatgtgaagcgatgtaatcaaatggatcatgtttgggttcctactgattttcacgtctcttcgtttgtacaaagtggggttgattcatctaaggttgtcaagattgtgcagcctgtaaatgtcggtttcttcgatccttcaaagtataagcctttggatctgatggcggttggggatttggttttaggttctgggatgaagaatgggtttgtgttcttgagtgtgtttaaatgggagcagaggaaag

SEQ ID NO: 192206 - DNA, 766 bp, Arabidopsis thaliana landsberg
  unsure (1)..(766): unsure at all n locations
cactaatggatgctataagggaagatatctctgccctcacactcctagcagaagtcttatgtctcctagatatgattgttaattcatttgctcatacaatatccacaaagccagtggatcgatactctagacctgaactaacaggtagctgattctcttactatcattcctcaaacacctaccatcgtatactcagatattccttatctctaaaggcttctacaacaatgaaaatgaacctttaggtgaaataattgatcaacgtttttttgtnnnnnnnnnnnnnnnnnnnnnnnnntggcagatagtggcccactggcaattgatgctggaaggcatcccatcctagaaagcatacacaacgactttattgtaagttgttagtgttatttctcatgatactatcatccctcaatttattcagagaaatcattttggtggcagagctactaattctcactaacatcagcatccaagaaatttgaagatgtctatatttatgtgttctgcagtttatgctctctcttccacaaaataagccctgtccacgcttttttaactcacaaattttctcttttgcagtctaatagtatattcatgtcagaagcaaccaacatgttggtagttatgggtccaaacatgtaagggaactcttgccttacttcttctaatgctgattaattttccagaaaatcctcattgactcatatttgaatttgttgcattccatatctcaaggagcggaaagagcacatatctccaacag

SEQ ID NO: 192207 - DNA, 206 bp, Arabidopsis thaliana landsberg
atgtgtattgtttatacgctccgggataaacacacattttccacacttttaattcgttaccgtttcaggaccaattttaaaaagaaggttggtactatactattgactagctagctggtcagggaccttgatggtacatggaagtttcatattttatacagaaacaaaataatagagagtataagaatatcaacgacgagatctga

SEQ ID NO: 192208 - DNA, 374 bp, Arabidopsis thaliana landsberg
atggtggtcaaccagctgggtctcgttgggctcctcctagcagtgggggtggtggtgccagcggcggtggctataggaatgatggagggcgcactggctatggttatggtgctgcagcagcaggtggtggtggtggtggctggaacaacacaagtggagggtgggaccgtagggaacgtgaagtaaacccatttggagatgatgctgagttagaaccggtctttacagagcaggagaatactggcattaattttgatgcctatgaagatattccagttgagaccagtgggggagacgtgccccctcctgttaacacatttgctgacatagatcaaagggatgcattaaatctgaacatccggaggtgcaagtat

SEQ ID NO: 192209 - DNA, 643 bp, Arabidopsis thaliana landsberg
atggatcgattattcacgcatagttacatagaccgtagacgcagaactcgcccagctcacacggatggttacactgtccacaatggcgtttatcgtaagccacgtaaacacattggccgcgacaacacgtctgtgagaacttgcatttgttcttacacgcgccacagttattgtcgtcactggacacgtctatgcacttattgttgcagcatgtcatcgtcgagttgcttcctccccctccgtagggggtacatatctcagggttcctgttgcaatggtctgcagcgttagggtttcgctcgcctacttccttttgagcaataaccggttcggccttatagtcggcgtactcggtgcatcaaagcttgtgtactctctaatggtggttgtattgttggttatggttgtgatgactgcgattgtgattgcggttgttattgcaatggacacgagtagcttcacgaaggccattttctttttgagctttagggttcgagagagagagagagattgttcttcttcctttttttctctttagaaatacttaaagatagaaaggattgtgattggtgaggaagtaggtgagggtggacttagtgtttatagttgtcctcgagtagagttgacgcaggaaatgcgatga

SEQ ID NO: 192210 - DNA, 217 bp, Arabidopsis thaliana landsberg
gcattcatggatcttacaacccgtcgcaaacgacctgtcacagatgctgatgtagcgagaaagcaagctgggctggatactgccaacgaaatgcttctcaccaagcgtcatcgcttgcaatacctcgaacgcaagacatctggtcctcagaatggagcctctgccaagggaagtggccttgttggcaaagtcatgggttctcttcgtggtccaactg

SEQ ID NO: 192211 - DNA, 126 bp, Arabidopsis thaliana landsberg
aaaaattcgaatgttgtgataacagaattggccgtattgttagaatgtgggaagttcatactgaaatacgttctgccaacgaccgtcatgtattccttgaaaacactcctcctgctagatgagaag

SEQ ID NO: 192212 - DNA, 548 bp, Arabidopsis thaliana landsberg
  unsure (1)..(548): unsure at all n locations
atgctcatggatgaacaaagagctaatctagagcaaaggtatgtttctaagtcttagtacattggttttgtgtactaatatacttgtccaagtatcagaaacagaaagaagaagaaaagagaagaggtggctgtgtacagccaagatgctgtttcacgtctggggcaccggactgtccggtggtgcacggacagtgtccggtgtgccaggctggctcgagcgaactggccgctctcgggaattgaccggcgacgtacggctaaaattcaccggactgtccggtgtgcaccggactgtccggtgagccaacggtcggccgggccaacggtcggccgcggaatctgcgcgcgacacgtggccgggccaacggtcggaaggggcaccggacatgtccggtgcgcaacggctcccagatctgcaacggtncgtgcgccattttaggaaggagatcgggcaccggacagtgtccggtgtgcaccggactgtccggtgcgcccgatgacagaaggcaagatcagcattccagaattgctctcaacggctcctag

SEQ ID NO: 192213 - DNA, 106 bp, Arabidopsis thaliana landsberg
atgacgaaaatccttgaggccgagggaggggtagaggccgcagcctggctcgctttccccaccgtcaaactggaggtcaccatcttgggtgaccaccggcggaggg

SEQ ID NO: 192214 - DNA, 302 bp, Arabidopsis thaliana landsberg
aattatcgtgtaggagactgtatgcgtcatttcttcgcaggtctacagaaggacgctgtattgcttttgtcttcgacaatatcgactttgcaactccagaagctagagaaacaacttacaggtttcaatttgatactctgagtttgaggcatggtttgcctttcaacaccgtattttgaagtttgtgcttttcagtcgtgacaattgggatttgttccaatgcagagaaaagagagcagatttttgtagttgatgcctatgttttaaaagggatgtctgagcttcttgatggaaacttaatg

SEQ ID NO: 192215 - DNA, 200 bp, Arabidopsis thaliana landsberg
atgcaacaacactggtttgtttttgaacacaatagtacttatggtgccaaccgtgagcacatcctcacatcgcttgcttctaatatgaagggtcctgacagtttctacaattcttcgttcggtgaggttgctgaccgagtgtacgtaatggatggtgcattccttggaccgaacaaacggtttgctctgattgtatcaag

SEQ ID NO: 192216 - DNA, 197 bp, Arabidopsis thaliana landsberg
acagagggcgctccccacttcgcaacttcagatcccagatccgagctccgtgtgcattaatcaaggaccttttgaacagagataaagatatcgcgatggcctttatcaaagctctcgcagctcaacacaaaaaagctcaacgaaaaagaagaagcttcgaaagaagatcaaccaaatgctgcggagggtcactgtga

SEQ ID NO: 192217 - DNA, 113 bp, Arabidopsis thaliana landsberg
aaaatgccaaggaaactggtaatgatctcgatatttgtcatcctagtggtgatctaacgaagattctagcagatcttgccgaggaaattggtgatgatctagatattgaactg

SEQ ID NO: 192218 - DNA, 146 bp, Arabidopsis thaliana landsberg
gatgcttctacttgggtcaaaatcaagggatagctaaagctggcggtgccccaacaatgccaaccgcttacccgactgcgccacaagccaatcaaggttacaatgctggagctcaaccttaccctcctacggcgtatgctgtctaa

SEQ ID NO: 192219 - DNA, 415 bp, Arabidopsis thaliana landsberg
tttcttgacagtccaataaaacgtaagttaggtaatcacgtgatcaagcattaaaacaaaaaatcaagactaatgagtcagtgatgaattccaacctccccatgtgtactttttacctacgaccattgaatatgtatacgttttatcagtaatggacaagtatcaaacgatttttttataaactaggcgctaaactaaacccacgccgatttggaaaacaactaaagctccagttttagcagagttcaataaaacgtaatttcaccttttggttgtagttttgtataatcgaatgttagttagtttatcacgtgatcaaaaagctatgacaactccggaagacaaacaaatcagttcatggtcatctgatttattacgttcagaaacacggtttctaaataaaccggtgccataa

SEQ ID NO: 192220 - DNA, 722 bp, Arabidopsis thaliana landsberg
atcttagaatgttttgctgaatttgtgcaggtctttcaacggagcagatacagttctgcttttggaaaggtaaacgttaactttcgacccagagaaatccggaaaatctattgctttgttctgatcaatacgttaaacatatacacacacactttacacttaggaccaatactgttctgatctgtgatagaaactggtaaacatctaacaattatgattgcaggattcgtatgtgtccgtggattcgaacagaagacaagagcaccgcgtccattaatggcaaggttgcattttcctgcgagcaaattgaagaacaacaaaacctaaagatgactggaagaaagcaaacgcattgcttctctgctctcctctatttaaagccaggaaaagtcccatttagacataataacaggaatccaaataggctattttctctttctttcttatttcattcatagagcagaagcgacacaaaaaagttttttgggttatttattttctctctaacaaatttgtagcgttttgggtctttttctggctgtcactagcgtggcaaatccaatgtctgcacacacttaggcgcattgtcaataaaatttctccggccaccggagtgtttagcatcttttaaccggcggctaatgcgaatatttccggtaacacatattccttattctatgttgggttttgtgataacggcagtgggccttactagacaatga

SEQ ID NO: 192221 - DNA, 161 bp, Arabidopsis thaliana landsberg
aaagatgtttttctagaaaaagcaatgcaaataaaatccgaaatctttccttctacgtagaaggaattaacgagaaaggatcagttttgcttttgcaaactgggaaaagaataaatctttcttggaaagaaagtttcagacgcaaacgcacttacttgtaa

SEQ ID NO: 192222 - DNA, 102 bp, Arabidopsis thaliana landsberg
atgctcaatctagctaggaaatcaacattctttcgacaagcagccaagaatatcactcttgctgtgaacgaggttagttcctcaactactcgtaggccataa

SEQ ID NO: 192223 - DNA, 303 bp, Arabidopsis thaliana landsberg
atggaattgaagtcggacctgcaggtcaagctgcccggcggcggcctggtcgacgtgctggccggtgcccggcaagtggtggctccgccgtcgaaactgaccgaggcgggcgggctgcgctatatgcccgccgcgggtggggctctcgatgcccccgatgagctgcaggtggctccggattggctttttcacctccgcagcaccgattccgaaggccccacctccaccctcgccgggtagccttcctcgccctggggcatgtcgaggtgcgcgtcacctgtagcgtgctccggagcaagggac

SEQ ID NO: 192224 - DNA, 795 bp, Arabidopsis thaliana landsberg
gaaatgagggaactgatagagcttcaaaggatgctgtatacatttcttcatgttatagccacacacgatctatcttatgtattgcttacgccgaaaagtagggcgtatctagattctatgatgcaactggatatgaatactttttgtaatcacaaggatattaccgtacgtaaggtttgtaacactttccctttggttgcatattcatttaattttgatgatctttttcgcttacttattatccacttgttttactctttgccataaaaataggcgtgcgtgcagatatttataaagcttattaaagattggtgtgccgagccatatagcgaggagaaggtaggcttgttaaataatttttattaaccttcttttcttcatgaaagaaggacaaatgtcataatcaagaactatttttgctttcaggttccaggttttcagaatttcgtgatcgaagcgtttgcaacaaactgttgtttgtacagtgtgctagataaatccttcaaattgtcagtgatgcaaatacggtaagcttaagaaacttcaattctcttttcattttggagttttatctgtccgttgcagttgtataaacttctgaattgtttccacaactgactgggtttcttccttcgctatgcatcgcagcacgcattgttcggggaaatcatcacggctcagaaagtaatgtatgaaaaatttggtaatacgtttctcatgcatcttatgtcgaaaagtttcccatcagcacatattccacaagatttggcggagcagtattgccaaaagttgcag

SEQ ID NO: 192225 - DNA, 75 bp, Arabidopsis thaliana landsberg
atggagctcgaaaagattgcatatgcagttgtcatgtcttcgcgcaaattgcaccactattttgaagcattcaag

SEQ ID NO: 192226 - DNA, 342 bp, Arabidopsis thaliana landsberg
atgctcgagcgcgtgcccgcccagccctatcgggagctggaagaaatcacgatgaagaccgacacgcgggacattctctcccacgcgacgaagcaggccgaaaacttcgaggactatttcctcgtcgatatcgacgcacatgtcaccgagacgcagttctggcccgagatcatcgcgatgatcgacaatgacgtgatccgtcagtggggcgaggcggcgctggcgcggcccggcggacagggcgcgctgctcaacgtgcagcccggcatgacctatcaatatctctacggccgcgtgccgcatcaggcatcgctgatggagccggtggagaaaggcggcgag

SEQ ID NO: 192227 - DNA, 539 bp, Arabidopsis thaliana landsberg
gttcgcgaagtgttccgttcctcggtgcttggcaacatcgcaggctgcctggtcatggaaggccgtgtgcagcgtggccagccgatccgcgtgctgcgcaaccagacggtgatttacgagggcgaactcgaatcgctgcgtcgcttcaaggatgacgtcaacaaggtcgaagccggcaccgagtgcggtatcggtgtgaagaactacaacgacatcaagccgggcgaccagatcgaatgcttcgagcgcgttcaggttcgccgtaccgtcagcgccgcctagttcgatccgcttcaatgccgaaggaatatccccgcaagctgcggctcaacgtccagatccagcgcgaactgacggcgttgattcgcagcgagttgaccgacccgcgggtggcgggcgtcaccgtgaccacggtggacgttgctcccgacatgcgctcggccaatgtcacggtcagcctgctggggagtgatgaacagctgcagacagcggggaaaggattgaatcatgccgctggcaagctgcgtcaacgactcggc

SEQ ID NO: 192228 - DNA, 1307 bp, Arabidopsis thaliana landsberg
atgcatgagcttcatttcgctgttcctatggctggtttgattctttgtccgcttaatactcgacttgatccttccacattgtcggttttgttagcacactccgaggccaaaatcctctttgttgatcatcagttacttgagattgctcatggagctcttgatcttcttgctaaatcagataaaacaagaaaaagtctgaagcttgtgttgatctctcagtctaatgatgatgatagtgatgaagatagctcatctacctttgcttcaaagtactcttttgattacgaatatgaaactctgcttaaatccggagatagcgagtttgagataatcaaaccgagatgcgaatgggatcctattagtataaactatacttcagggacgacttcgagacctaagggtgtagtgtatagccatagaggagcttatctcaattctcttgctacagtctttcttcaccagatgtctgtttatccggtgtatttatggacagtgccgatgtttcactgtaacggatggtgtcttgtttggggagtagcagctcaaggtggtactaatatctgtctcaggaaagtctctcctaagatgatctttaagaacattgctgtgcataaagtgactcacatgggaggagccccaactgtgttgaatatgattgtgaactatactgtgactgaacataaaccgcttcctcacagggttgagatcatgacaggtgggtcaccgcctctaccgcagatcctggctaagatggaagaattaggtttcaatgtgtctcatctttatggtttgacagagacatacggtccagggacacattgcgtgtggaaacctgaatgggattctctttcgttggtggagagaactaagttgaaggctagacaaggagtgcagcatttgggtctagaagggctcgatgtgaaagatccgctgacaatggagactgtccctgatgatggtttaaccatgggtgaggttatgttcagaggaaacactgtgatgagtggatatttcaaggatatagaggcaacacgaaaagctttcgagggagattggttccacagtggtgatctcgctgttaagtatccagacgggtacatagagataaaagatcggttaaaagatgtgatcatctcaggaggagaaaacataagctcagtggaggttgagagagttttgtgcagccatcaagcggttcttgaagctgctgttgtagcacgtccagatcatcactggggacagactccttgcggttttgtaaagctgaaagaaggatttgataccatcaaacccgaggagattatcgg

SEQ ID NO: 192229 - DNA, 418 bp, Arabidopsis thaliana landsberg
aatattcgaaattattacttaaaaacgactttttgtaaccgtaagtcttaagaattcgaatagacagtaaaacaatttccaaaacagaaaaaaaattaacagcaaaacagaaccaatagtgtctcctaaaagaagtaaaaataaggtggaggagaagtagtcaaatagaagaaataaaagcgacgtcgttgtcagaagaatataccacaagaatatgtcaaaacaaaaacagaaatatgattacgtataagtagccgttcccgacgctgcctctttttcattttcacaacaccatttcttctttctttctctcttacagtttctgaagaaacaacaaacaaacaaactaatactcttctcttcttcttcttttttctttccttaagacaatcccatattagagattgtttgcgagaaa

SEQ ID NO: 192230 - DNA, 279 bp, Arabidopsis thaliana landsberg
cgtcatgatcgtgatcgggatggggttgacgaggatcgcggcgcgcatctgcggaatcgtgacgaagaagaactgctgagtgcccgtcgcgccatcgacttcggccgcttcgtagagcgagggatcgatcgccttcagcgccgcatacatgacgaccatcgagaaggccgtgccgcgccagatgttggagatcagcgccgaccatggcgcgatcgacggatccgaaagccaggcgacaacgggcagatgcatcatccgcaggatactgttcatcgcgcc

SEQ ID NO: 192231 - DNA, 390 bp, Arabidopsis thaliana landsberg
atgaagacggcagatattcacaagacggcctttcgaacccacgacggcctctacgagttcctcgtcatgccgttcggcctttgcaacgcgccggcgacgttccaggccctcatgaacgacgtcctccggcccttcctccgtcggtttgttctagtattttttgacgacatcctgatatacagttcttcatgggccgaccacctgcgccacattcgtgcggtgctgacggtgctgcagcagcaccaactcttcgtcaagcagtccaaatgcgcatttgtcgtgccatcggtggcatacttgggccatgtcatctcggcgtccggcgtggccatggatccagccaaggtggaggccgtccagggctggccacagcacagttcggcgcgggcg

SEQ ID NO: 192232 - DNA, 128 bp, Arabidopsis thaliana landsberg
ttgtgaagctaattgtgcacggaaatataaagggtatggtgattgccgtccaggagacaggccacacgacaaaaaagactcgttgttttgtttctgcaattatccttgttaaaattaaaaacacctaa

SEQ ID NO: 192233 - DNA, 107 bp, Arabidopsis thaliana landsberg
atgatagataagagaagaaatacaacaaaagtgaaaggaaaagttcgagcaactgatgacgtggtaaacagtttttccttccatttttgcagattagcgatatctaa

SEQ ID NO: 192234 - DNA, 250 bp, Arabidopsis thaliana landsberg
atgataacgagtttgaggatgtcaacattgcacagcccaccgacttctcactttcatgaagagttgcttactgtatcaaggaaacgtcaggagaaggtattgattcaaaacacaaggaggagtctataaacgccagaagttgtttcttttgcgtctctgcttgtgttaacgcctttttagtttgttacagacaattgttgtaagtaaagatattgagatgtggaagtttgattgcaacttgccagattag

SEQ ID NO: 192235 - DNA, 111 bp, Arabidopsis thaliana landsberg
atggataatatcgatgcagtggaagcttatgactttttgaaatccagatctaaattcagtcaatcttcagctgaaattgtgcgttatttgaatgacctggctggtttcgag

SEQ ID NO: 192236 - DNA, 22 bp, Arabidopsis thaliana landsberg
ccaatcggaatatgccagctaa

SEQ ID NO: 192237 - DNA, 782 bp, Arabidopsis thaliana landsberg
atgtgcgtcgactatacggatctcaacaaacactgtccaaaggatcccttcgggcttcctaggatagatcaggtggtagattccaccgctggatgttctgtgctgtctttcctgaattgctactccggatatcatcagattagcttggcaaaagaagacgtggaaaaaacagcgttcatcactccgttcggtgctttctgctatacctccatgtcgttcggcctcaaaaatgctggagcgacttatcagagagccattcaaacatgcttagccgatcactggggcaagcgtgtggaagcctatgtagatgatgtggtaatcaaaacggagaactcagaaaacttcatcgaagacttacagcaggttttcaacagcctgagacgatatcgatggaagctcaatcctgaaaaatgtgtctttggggtaccagcaggaaagttgctcgggtttattgtcagccaccggggaattgaagctaatccagataagattgaagctatcatgaagatggaagctcctcggtcacaaaagaaggttcagcgacttactggatgtatggcagctctgagcagatttatatccaggctgggagaaaaaggtttgccattttacaagttactcaagaaggtggataagtttcaatggacttcagaagcacaagaagctctagaagcactgaagaaattcttaacaacaccaccagtactgaaaccgccacgtgagccacatcaactcaaccagctgaagatctgctgctgtatatctcttgctcgactcacgtg

SEQ ID NO: 192238 - DNA, 150 bp, Arabidopsis thaliana landsberg
ggagaaaatgatgatgtcttcttgggtgatgatggagaatctggacttgtgattgacactcctagcttagagtttctgcgtatcagagattttccattggaagacttcatagtggaaagtgttatttcttctatcaagatgtgtatcgat

SEQ ID NO: 192239 - DNA, 220 bp, Arabidopsis thaliana landsberg
atctcgtcgggttcgagataccaaagagacaactttctcactcggtgtcggtaccggtacgatcttcttcgatgggatgttcatgttcatgttatcaaatgtcggagataagtttgataagtttgaaaagtttgagatgaatagagaaatcatttttttgttgatgttatcttcttttctccgccgcaaatttcggatcggaagcagagaaacgatttga

SEQ ID NO: 192240 - DNA, 360 bp, Arabidopsis thaliana landsberg
caacgctggccggttcaggaatggcatttacggagcaattgtaccacgaaatgccttgaatcgctcgatatcaacggcgcgggatttgataaggtattgcagagagagatcgtatcgcgcggttaccgcattgcctataacgagcgggcagtagtgtatgatgaaaaaacatccaagcccgaacaattggtcaaacagcgtgctcggtggatcaatacctggttcaggtatttttcatttggctttggcttattgggcaaaggcattgccaaagccgactggaaccggttggtcttcggcatcatattgctgcggccgcctttgttcatcttcctgctggcatctgcaggcccccttgtg

SEQ ID NO: 192241 - DNA, 759 bp, Arabidopsis thaliana landsberg
atcgattcattccacaaccaagcttagtccatttatggtagtatatggttttaatcctcgtgccccaattgatttgctacctttaccaccttctgaaatagtgaacttggatgctacacaacgttatgaatttattcttaagttacatgaaacaactaagttgcaaattcaaaagatgaatgaaaagtatcgtattgctgctaataaaggtaggaaggaaatgaaattggaacctggtgacttggtgtgggttcatttgagaaaggataggtttcctgatttgagaaagtctaaacttatgccacgagctgcaggtccttataaagttcttgcaaaaattaatgataatgcatatacactggagttgccgccagattttggggttagttccacctttaacatttcagattgaagccatatatgggtgacgaagatgagatcgagtcgaggacgactccaattcaagaggaggaggatgatgaggacatcacttctatacatacaatgaatggaccgataacacgatcgcgtgcacgacagctaaatctccaggtacgttctaccctagtcaattgtgtttcagagcttacgcttagggccatggatgttttgatgattaggaaccttggagaggaccagcaaggacttgggaaaggccaaggtgttgaggaggagaagcaagggcgtccacaacaggaaggagatcaagtccgagtcggctgcgactccatctcgggttccaggaccagtctgcactaa

SEQ ID NO: 192242 - DNA, 428 bp, Arabidopsis thaliana landsberg
atgaaccaggtgcaagtgatgttaatgtctctaaaagctggaaaccttggattgaatatggtagctgcaagtcatgtcattcactgggacctatggtggaatccaacaacagaggatcaagctattgatcgagctcatcgtatcggacaaactcgggctgttacggttactcgtattgccatcaaaaataccgttgaggaacgaattttgactcttcaggtatttaattgtgtttttgttccaaaggccaaagctatcaagatctttttctttgtatagtgtacacgactcactccactctattgttatttttatttcaggaacgtaaaaggaacattgttgcatctgcattgggtgaaaaacatggcaaaagttctgcgattcaactaacactagaagatctcgaatatctgttttttggtgtgtag

SEQ ID NO: 192243 - DNA, 82 bp, Arabidopsis thaliana landsberg
gtattcgtgtcgctcaacaccatgggtggtgtcgttcgacacctacgtgcattttcgtctccggattgcttctacagcttaa

SEQ ID NO: 192244 - DNA, 78 bp, Arabidopsis thaliana landsberg
atgagcctactacaacttcaaaacagactcttacgctccatagctgcaatgcttatgagcgcaggaggtatcggacag

SEQ ID NO: 192245 - DNA, 48 bp, Arabidopsis thaliana landsberg
gttctttgcaatgatgtagatgattttggctatattcacgaaacttag

SEQ ID NO: 192246 - DNA, 156 bp, Arabidopsis thaliana landsberg
ctaaagtctcctaaccaaacaccaacaccaaatatcgaaaccctcgaaatcagaagaaaccacaaaaagagacaaatctcagcgaaatcggattcaaaagcttactttgttaagatgaaaatgaacgcctttcacatagaggtcaagatcttgtga

SEQ ID NO: 192247 - DNA, 276 bp, Arabidopsis thaliana landsberg
attgatttcttgcatgctgtgatgtctgacaaagaatatgatattattgtaagttgcacatccatgaatttgtttgaggagccaaagctacctccagatttccgtggtagcagttctggtcccaaagctaaaatgcgtctactggctgacaaagtcaacttgaatagtcagatgattatgtcacgtacagttaccatactggctgttgatatcaattatgctcttctcgagttacgtaatagtgttaatgaagagtcatcattagctcatgttgcg

SEQ ID NO: 192248 - DNA, 243 bp, Arabidopsis thaliana landsberg
ggatttctatatttgtgttgtcacaaaaaacaatctaccaaaaggaacttgctaaaatgagatcacttggagatgaaatcggtgtccccatcgaggtatatagacccataatgaataaactcaagacattcccgcttaatcagtttctaactatgtctgtttgatttcaaggtgtatggtcctgaagcaacaatgacaggtatatgcaaggaggcaatccagtacatcaccgcggctgcataa

SEQ ID NO: 192249 - DNA, 506 bp, Arabidopsis thaliana landsberg
aatcggggaagttattgatgatgatgtcctccatgcacgggttccgtttgttgcccgtacacagcagtgttttgctttaaaagccggaattgatggatttttggatattgcaagaagaaccttctgtgatactagtgaaggcaagaatttgcttcattttttattatcactgctttctccttttaaaatcttgtttgctaatctgcaatcttgttaacactggcagcaatacataatctggccagtaagtatcgtgaggaattcaacttgccaaatttgaaactccctttcaacaacaggcagggattctttttcagaattcctcagaaggaagttcagggaaaacttccgaacaaattcactcaggtcaaaacgcagttcaatttgaaacttaatgttctctatatatatcgtttccctgactttatttttcttgtacgtcgtatgtaatccaggttgtaaaacatgggaaaaacatacattgttcgagtctggaactggcttct

SEQ ID NO: 192250 - DNA, 112 bp, Arabidopsis thaliana landsberg
ttatagtcgcacttctacgatcgcgaccgtcccacagattactaatcatagtcaggggtattacactattcaacaaattggtcatagaattactcgatggaaacgtttctaa

SEQ ID NO: 192251 - DNA, 1355 bp, Arabidopsis thaliana landsberg
atggctagggcacatctatgcactaatgactatgatcacatgtgggagaaacttaaggagcaaagtgtaagagccttggaggctaggttttaaccaagagatgtgaatgaccaaaagcattaccctagttgtgtgcaattatcactttggacaagggggaaataaaccctagacctctcttgaaccctatctcttaagcaccttggttaaaggggagaatttaagcaaaggtgcaagtcatgaccaaacctttggcacaaagttagggaacttaataatctacaaatatagagaggaaacattgctaaaagaccccttaagaaaccccaaatccattccctaagtagagaaagagctagagctctctaattctctctaagtcaaaatctacacctaatctaaagatccaccgtgttcaccttgaagatggcaccaaaaccacctaagttctataccaaaaatgtggcataccacctagggcaccccctggaaaaagttgagaccgagaccttgacatttgacatgtcttggcatcacttttgtcgcgcagcgggcagggggacaagccagatttggcgtccgcatatcttctgacctagggcttatcttcccttggaactcacatataagagatagccataggtgccaggaagaggtctgcgccggatttttgccaagattcgcacgtttgcgatctcagcaagcgtttgaacacgggcagaaacaaaccgccacgtgttcgacgccgtctgccgcgccagagcacgtcccgccggggcccggccgcgcccaagccaagccagtgccctggtccgtgttcgcgactataaaacgcccaggagccttggtcgtacccctccgcacgcgctcaagcctcaccggagctcagttcgccgccgtttgcccatacgcgacgtgcccgcggccacccgagcccctgccaccgtagaccggccagcccagccattcccaaccccgtccagccctcggagaagactgtgcacgtctccgtgaagctccctgagcgaggaatcgggctctgcttcaccggagaggccggcccaaggtcaccggacttcaaccgaccgccggcaaccgtggaccgaggtacaccgtgcacctctcttcgattccttgcacggttagactccttagacctccacgaagctccctatgcccttggattgaactatgccgccgtggataggccggagcacacgccgccgacgagctcgcccgcctgctcacgtggaccgggcgattccggccatccccgacgacgagccgtacctcgatgtgatcgccagaccctccccgagccaaccctacacttcgccggaactccctcgccgccg

SEQ ID NO: 192252 - DNA, 96 bp, Arabidopsis thaliana landsberg
atggtagccccttgtgcaggagatgcttggtatccagtgatccttggtcgatggaatgctgccctgaacacgtactcctatattggttttctgaag

SEQ ID NO: 192253 - DNA, 102 bp, Arabidopsis thaliana landsberg
ggggtttctactaccatatggacttatccgacttacttgattatattgcagtcccgtcacctgttggtggacttaaggtcgcagtaaatgtagttgagcaag

SEQ ID NO: 192254 - DNA, 204 bp, Arabidopsis thaliana landsberg
atgcgccttgtttacgctggatctcagatatctgtgaagaatgagattcttgtcatgaagtggatgtcagagaaatgtggaagtgttttaagggatctgccaacttctgtcacagaggacactgtgcttcttcataacattgacaaactccaagatccagaattgcgtttggagcagaaagaaacagaagcttttggcagcgaa

SEQ ID NO: 192255 - DNA, 463 bp, Arabidopsis thaliana landsberg
atgaatgacacgtttgccaatttcaagaaggtatccgagaaatgccatctccacaacctgattctccaaaccttgaagggatatcatgaaaccagtccgatcgaagttcgccacgttggtggtactctcaaacttaacggagatacaatgtcaagtttatccatttgcaaaggcctaggtatgtcgtgccttgttaatgaataatcacgtctttcgttcctaactttcgatagccgcaagctcaagctcgaatgttgctcctgactcgctgcgaggcatccagctcggattagctcaactccccgaactgaatagtgcatcattctacaatctaatgttggattggatccaagattgtgattcgaatcacgctgagtgccgccgaccgagccttgacctggagtgtctaccgactcgacttctggatgttggcgaaggcggaacccactcgtacgactcattg

SEQ ID NO: 192256 - DNA, 120 bp, Arabidopsis thaliana landsberg
atcataggtcggactagaactcatctgcggaatttacaatctccatgtaaatttcgcaatgaaagaaaaggatgcgtccaatataaatcgctatgtgacgttgatgatcgaacaaaatga

SEQ ID NO: 192257 - DNA, 56 bp, Arabidopsis thaliana landsberg
atgccggtcccactcccagcaacactatctgggaccagtcctgcagcacttcgtcg

SEQ ID NO: 192258 - DNA, 254 bp, Arabidopsis thaliana landsberg
attatttttttctaaaatcatcatgagaaactcggtgaaatgggaaacggaattaaccggagatcgcagcaggagaagagaagccgatgagtcctcggagacaccaaagatcgtaaagaaggagaagcgtagtaagaccgtaattgcttcattacggcctcaacaaccgccgattcaggaagaagaagaacaaggaattgctgatcggagagctataagatctcagtatcttgctcttacccacaagatcaaag

SEQ ID NO: 192259 - DNA, 387 bp, Arabidopsis thaliana landsberg
atgagagatcagtcgaggaatttcgaaatggtaatttcatggggagatgaattgatccatgttttggatgataggaaaggatttgacgtgttggtacaaactctcgagcaactgagagctattccattctcctgcgacgaagattttaaagagatacatgaatctctccaaggttgaatgccttcttaaattgggttgatgtgtgtttgattaagtggtgaatttaattttgttgcgccaaatttgcagaagaaactcgatgtttgcaaggagaagacagatgaggcaaattcagagattgcggatgaagaagaaattgagcgtcttcataaagagctcgatgaagagctagaactagagtgcaagctgaaggaggagcttagatac

SEQ ID NO: 192260 - DNA, 244 bp, Arabidopsis thaliana landsberg
atgataggaagcaagactgtacaggtaacgaacgttcgtaagtgcaggcctgttaatcacctggtacatttggctacttgtgtcattggattatggctaatggattgaccgtcacctagagttctcctacagggcgtgcttgatctagccgttgaggtcaacagctacgtgctcaagtgctgtacgtggaacgcgtgcgcgcgcacgggccacattgcaaagcatagtttgacatatatatgtg

SEQ ID NO: 192261 - DNA, 682 bp, Arabidopsis thaliana landsberg
atgtctcacagtttgcctagaaatacagttcgtaagaaattcaataaagagcatgcaaggcgtgaggctgaagcaaaagaagctgtagaacatggtaaagaaacaaacctgaatacagctgttgagaaagaaaaacaggcacaaagacgtcatgcattttatccaacatccagttctcttaatttttcatatggtggacgagtgaccaatatcggaatagagacgaaaagtcatcattatccatttacaataagagccctgggcgatgcgccaatctggcccgaattccgtgcgtcttatccaacttctatctggtcaggaatgtattccagaaccgatattactcatcctgagtacaccgatagggcatacggttacttatactcgcaggatgggttcaccgcttcggccagtagcgacaatattgcccgagactttaccaaaaaagatattgcctacagtaaaaaggttcctaatctgtctccttcaaaaagcacatacgatattttcactttttccggacaaggtacgggaggttttttcaggccttacaatattggagtagatgtatatgccgaaaagaaaaaaagtagtgtgagtgtgaccaatgagctgacaggagaatttggactcgaaacggctgtcgggttaaccaacctccatattggtctaggatacaacc

SEQ ID NO: 192262 - DNA, 112 bp, Arabidopsis thaliana landsberg
tattcttttgcctctaaacattacttgccctacaaaataaaagaggacgtcggttataaacggacactaaaaagattatgtcgtttattcaaccgacttgctaagggccaac

SEQ ID NO: 192263 - DNA, 104 bp, Arabidopsis thaliana landsberg
gagtcattcgtcgcgcccaggtcatcatcgagggcgagccattcttcatcgacctcttcgtcatgccgctcgcagggtacgacctcgtcctggggactcaatga

SEQ ID NO: 192264 - DNA, 2294 bp, Arabidopsis thaliana landsberg
cttcttcgccggagaagaaggaagtttcgcgtttcccgattcatcggaaactacggtggagttaacggcgccacgaaatcgtcttgagacagagaaggggttcgcaaataattctccgacggtttgtgtgaaagaagaagaggcagaagaagggaaaaaactcgatttggattgtttatgaagaattcgaggaggagaagagctgcaaaagctaagtgccgccattgaagccttgaaggattcacttctgttcggtaaaagaaagaaacagaaattgatcaaaagaaagaagttggacaatccgaaacaacaagaaccagaccgaaccagatttaataattaaaaaaaaaaaaaaccatgtcacgtgagcttttttagggttcacgtgatcatctctatcgtcgaaatacaagcggcggacttcaaaatcataacttttttcttcgctcctctcttagcatcgccgtgaatcgttggtctcagtttctccgtccatctttgattcgtcgatccgtaagcatctattcagtttcatgtcttttgttctaaactttttggtttgattggggttttacctttggttaattaaagctttctagattcttagtgtttggattgaattctgtaaggtttggtaaaactataccaggttagttgctatctagctgcaatgggtacagagacggttgtgcatgatcaggcaagatgggcaatggctgcaatggaacgaaggcttgctgttgcaaaagctcagcttcttcaacaacaacaacagaagaatgagaaagataagaaggggacttctgatgtagatgtctctatgaaagaatctcatcaagctgattcactgcctactccctcaaagacatcaattaaaaaaggtttgatggttgagtataaacgaagaatgattctctctagcaactctttattgaactctgattgtcatgggaatttggttttgtagtagatcccaaggatgatgattctgttgcatatacaaagttgtcccatcccgttgatgagaatctgctggcaaccaatgttaaggtatattcagattcttgaggagaacgaagctcggccttcttctgtatgatagataagattgctcaatgtgtgtgtttttttgtgattcagttttctagtgcaaagggaactatagtagacaaggttttgcataaccttcttcgaagcggtgactctgctcaaaagtacttgcaaggtactaaaagtgtgaagctggataactatatccttcttgataattttgtacagtcacggtcttcggcctctggttctaaaaaggcatcacagaaggattcaaaacgttctaaaagccgtatgtctatgaagcgactcaagaaatctggtgctttgcatatccctaaagatctccaaaagtgagttctttatattttttttttttttttttgctgtcatatagattgaactggctcagcctatgcatctgagtctattattttggtattcttaataaagtttaagtgattacttgttcacttgtgtttgagtgcaggtttgatttgtttaagccaatgcatggtatgtgggaaagttacatgatgaaactcatcaaggtgaccgggtaagctacttatctgattaccgaaatactgattcaaactatgtgctttctataaggacgaaactgatgggagtaatctagtatacacaatcattttaagcttggtcatcattcttagacaatttactttttgcaggaagattcaattatctttaactcttctctcagcagatcttcatggtgctttcatgtttggtaatccttcattctttcacaaatctgttttactaggatatgatcttttgtctctcactcactttccaaaacttaacttctctgtacgcttaaacaaaccttaaaactagtccttttttttcatattgtaatttgttccaatcatagcaacctattttacttgtgacagttgctgagtgcaagatagcatcattcactggtgtacaaggcataatggtgcgcgagacatccgaaacatttggaataatcacacgagatgacaaatttcgaggtatcttaaagcttttttcaccaatatatttgccataaatatcttgaatcgttctcttccccagcctcaaggcttaacttagttattgtaaacaatctgatacagttgtaccgaagaagctctctgtcttcatcatccaactcgactgctggaagattactttacatggggacaagttcatttgaagagacaatattgttaacgttaatgctaaaatga

SEQ ID NO: 192265 - DNA, 45 bp, Arabidopsis thaliana landsberg
  unsure (1)..(45): unsure at all n locations
atgagtctatcatactgcgtgagactcatgtccctgcactcnttg

SEQ ID NO: 192266 - DNA, 195 bp, Arabidopsis thaliana landsberg
atcgttccatgtctcataaacgtttcaatccgctgacggcttcttcaagtgacgaagatgaattggagactccaatcagagaaattgaagactcttcatcggatgaagaaactgattccgattccgactccgaactcgggaagaaggatgaggttgtaaccgaagtttctgccttaaagaatcaagaatccaaaa

SEQ ID NO: 192267 - DNA, 1001 bp, Arabidopsis thaliana landsberg
gttatgtgacggtggtgaattgctagatcgaatactagctaagtaagattaacaaaactttgtattaacatagaagtaatgctaaaattctgtaagaaaagatgggaagttacatcaagtcaacttatgtgtatatattttccaggaaagatagccgttacaccgagaaagatgcagcggttgtggtgagacaaatgctgaaagttgcagctgaatgtcatttacgaggtctagttcaccgcgacatgaagccagaggtaggtacgattcagtttgattcaatgcttggaaattgcaaatccatatgtgaaagcatcttcatcactttaagaagagttatgatcccttaccctctcagaattttctgttcaaatcaaccgaagaaggttcatctctaaaggctacagattttggtctgtcggacttcataaagccaggtaaaagtttcacttgtcaagtcttgtctctgagagcagaatggtagataatggaggtgattttgtgaaaacggcaggagtaaaatttcaggatatagtaggaagcgcatactacgttgcacctgaagtgttgaaacgtaggtcaggacctgaatcagacgtttggagtattggtgtcatcacttacattctgctctgcgggagaagacccttctgggataagactcaagacggaatattcaatgaggtctagtactcatcttcttgagaaaacaatccaatctatataatctgtttgttcatggatactattgacatgaaaaaacaggtcatgaggaaaaaacctgatttcagagaagtcccatggccaaccattagcaacggtgccaaagatttcgtgacgaagttgttagttaaggagcctcgggcacggttaacagcagctcaagcgctatgtatgttatgcacaagcaaatgccatatatttccattatttttggttaacttataagttactcaacttatggatttggtttgtagcacattcatgggtgaaagaaggag

SEQ ID NO: 192268 - DNA, 379 bp, Arabidopsis thaliana landsberg
atgctgaatctggcaggttcttgtcgccgctgtaactcgtccaaaggtaatctaccgctcgttgtatggtctaccgatgaacagttgaaggacatcaaatcccgcgtcaagagtttggcgttgagcgggtcgcggatatcgcaatcaaggttccgttccaagtatttggcgcaactgtccgctagcgaatgcgaacgctctatggagtctctctcctgggcagcgaaagatatccgtgatcgaatcgcaagcgaattgggagacaactcggacgtaatgcttgtgtcaggtagggttaccgatgccgtacgtaagataggtaaaatcaactccgctaggcatccgttgttgctgcacccatctggtgaggagcataaag

SEQ ID NO: 192269 - DNA, 47 bp, Arabidopsis thaliana landsberg
gaaggggccgaagcgcctttgacaacagggtaaactactgcacgtga

SEQ ID NO: 192270 - DNA, 496 bp, Arabidopsis thaliana landsberg
attacgcgttgaaaagattctaaagaaatacacattcagggctattttagacatggccacatatccgtctatggtagctacttgtgtagttgtggtaggactttttggaagtggtgggtggaaaaagctgagtacagaaatggaagagtttcaactagggaaaagctcatacattttgataaacatcggttcaacgatatcatggcaagcttgtttgattggaagtgttggtttgattatcgaagtttcatcgcttttttccaatgtcataagcactctttgtttaccagttgtgcctgttcttgctgttgtcttcttccgtgatgagatgagtggaatcaagttgattgcaatgtttttggccatctggggatttgtttcttatggttatcagcattatgtcaatgatagaaagccagaagaagaccaagagcttcctcagtctaaagaagaagaagaacaaaaacaagtagataccattcatgtccaagcttag

SEQ ID NO: 192271 - DNA, 375 bp, Arabidopsis thaliana landsberg
atgggctcgcgcgattatgcgatgcgggtatggctgaagcccgacaggatgaatgcctaccagatcagcgcgaatgagatcatcaccgccatgcgcgcgcagaatgtggaagcagcgccgggaaagaccggtgagagttcgggcaaacaggtgcagccgatgcaatatgtgctccggtaaaccggcaagttcaccaagcccaaagaatacggcaacctggttctccgcgcagaacagaatggttcagtgctgcggctgaaagacattgcagatattgaattcggcacgcaggattatgatatgacttcctggacggatgaacaaccatctgcttccatcatgatcaaacaaagacccgggtccaatgcgcaggaa

SEQ ID NO: 192272 - DNA, 762 bp, Arabidopsis thaliana landsberg
atgaaatgtgtatgggacaaacagaaaacttcttggcttgtgatggcttttagcgaggtgaatttgtaagccacgctcttatatatataagtaagtatatggtcattgaatttcatgttgatattcgctttcactttgagaacaacttcaaaattcagatcgtgaccaactatttcatcaattgctctgttatcagacaggctatcaaaagaggaaaacgcgttggtataatttgaatgtacgacgagtatgaaaacacaaaattcttgaataagaaaaggcttcatgagtagtagtagtagccaatagaccatgtgaatccatccttacctgaatttgacccatataaggtacgttgccacgagattttaccgacctcatcggctttttcccacaaccattgtcaaataaccatccacactgcaatttttttaactagtttccctcaaacagtaaactagttcacttatacataaaacttctggtttgtaagtttgaaacaaattagtcccaatgattctcaaccagtaccatgccgttactctaagagcataagaagcagggcatgattaattactcgttcagccaagtgactttgaatacactagctactagtatagctacaacaaaaatgttaaagtatatctttcttttcttttctaggaagatggttcatcatcatcgaaccgtttttctccacttttctccattcaatgtttcgtccttggctctacgtgtcgaattcgggttgatccagactaa

SEQ ID NO: 192273 - DNA, 382 bp, Arabidopsis thaliana landsberg
atgtcgactctggtggttttggatctatcttggaacttccaaatcaccgagttgccaaaaggaatctcggcgttggtttctttgcggcttctcaacttatcagggacgagtataaagcatctgccggaaggtttaggagtcttgagtaaattgattcacttgaatttggagtccacttccaatcttcgaagcgtcggtctgatttcagaattacaaaagttgcaggttctaagattttatggttctgctgctgcattagattgctgcttgctcaagatcttggagcagttgaagggtttacaacttttgaccgttactgtgaataacgattctgttttggaagagtttctaggaagcacaagattggcagggatgacgcagg

SEQ ID NO: 192274 - DNA, 480 bp, Arabidopsis thaliana landsberg
agtcttacggcgatgacgagggagggctggtggaggtcacgcagccgcgctaccggcaggtagtccgtgaactgcggagccagatcctctcaggcgaccctgcgcccgggggtgcactcaaagggcagtcgacgctggcggggctgctcaaagtcgattcggcgatcgtcaaccgcgccctggcggcgctcgccgccgaggggctcgtccgtgtcgagcacggacgcaggacggtggtgctggaacgcgaggcctggcatctcgagttcgaggcgcgcgtgcagccggacgagaatgcacggaaggaggccgaggcatcggtctcagcggcgctggaaacggcaaccgccgggcagcccgcgataggcggcaccaccgtgcagaggtcggtgcacggcgtcaccgtgacgatgaacgttcagtcagccgacctaagcggagccgtcgtcgccgcgctgtctgttgcgcgggcggctttgg

SEQ ID NO: 192275 - DNA, 266 bp, Arabidopsis thaliana landsberg
atgcgagggcgcgtctggccggtggcgcggcggcttgacagcgaggcatgcgtccgcgtgtggccgcctggccagtaggtagcgcacgaccatgccggcagagtgagggcgttgtccgctgtctgcgcttggccgcctggccggtgtcgcgacacttgccgttgaagcgcctgcccgctgtctgctcgtgtccgcctggccggtggcgctctgtcctctgtagactctacggctgtacgcgcttcggcgttggctgcctgggcctg

SEQ ID NO: 192276 - DNA, 333 bp, Arabidopsis thaliana landsberg
cgctccgaaggcggcggcctgggcatggggacgagctcgtccaacggcctcatcagcgtgcgcggctcggccaacctgctgacccgcaccacgggcatcctcgcggcgctgttcttcgccaccgcgatcggcctcaccattctttccgagctcgatcgcggcaccgactcgatcctgaacaacgcggtgcagggcggcgagcagccgaccaccgtgctcgacgcgctcaagcagatgcagcagcagaacggcggcgacctgccggtgcctgcggcgaccgacgccactgcgcccgcgaccagcacgacgcccgccgccgactcgagcctgccc

SEQ ID NO: 192277 - DNA, 71 bp, Arabidopsis thaliana landsberg
atgactgtggaagtctgtacagtatatgcaaagaagttcacttactcagcttttgtagccttcagtttcag

SEQ ID NO: 192278 - DNA, 189 bp, Arabidopsis thaliana landsberg
attaattggtttgatcctgttcaatttaaagtatccacttttggtttggcagaacctcgattgagagatcgaggcttccaaaaattgacgggcaggcccaaccaaagtaaggcaaggcccactcgccttgaaaattatgttcgtcaaattctgtgtcggcacgatccgccgtctctaaacgatcattga

SEQ ID NO: 192279 - DNA, 622 bp, Arabidopsis thaliana landsberg
atgagggacacgacatcatcaatcaactttttgattgcttcacgaacgacacgcaactcaaatatcatgaacgtcacacatgaacgtttgattaattgatcatttgtattttggatctatcaaaactcaaatcgtattttgcagatggtgaaacaaattggggtgcaaggaaaaaggagaaaggaagaagaagaataccacgtgttttgatgaagccaaaatctctctctatcaagaaacgcaaaacaatgttcaattacttcaatttagttattatttcaaaccgaaattttgattggttagttcaaacccgtgtaatatttccaatctctcaaaatccaatcaaccgcaaatcacctttattgttatctatggaaacacatatcgccaatctaattacatacacacaaacccaatctcaacaaatttttagatttcacacgacttcgattcatccaccagaattaacagagtaatcctcggctggggagatggttactacaaaggagtagaagataaagagacgaagaagaacaacacgaacacggcggagcaagagcatcggaagagagtatctccggcggaatttgagtttccgatgaatcaaacgatgaagaagtaa

SEQ ID NO: 192280 - DNA, 627 bp, Arabidopsis thaliana landsberg
atgaatctgaatagctctcggaatctggaaatccttccaaatcttatggaagcaacaaagcttaaaacattggatttgggttggtgtgagtctttggtggagcttccttcatctataaagaaccttcagcatctgtcttggttagagatgtcttgttgcaaaaaattagagatcatcccaactaacatcaacttaccatctctagaggtcctccactttagggattgcacacgattgcaaacctttccagagatttcaactaatcttcgtcttctcaaaataaaaggcaccgcgatcactgaggtacctccatcagtaagttattggagtaacatttttgaaatttgcatggagaggactaaggtcaagagattggatcatgttccttatgatttagaaatactatgtttgaggggtaatatagaattggagtctattccgcgacacctcaaccttctccctctgctgcagatgattgacatctcctattgcatcaatattatatcgctaccgaatcttccaggctcagtatccgccttaacagctgtaaattgcaagtcacttcaaagactagatggccaccttcgaaacagaagcatctccctgaatttcaataactggaataag

SEQ ID NO: 192281 - DNA, 836 bp, Arabidopsis thaliana landsberg
cgcgaattgaaacaatccgccttctgataagtcttgcagcatctaatggatgggaaatacatcacttggatgttaggacatcgtttctccatggcaagctaaaagaaactgtgtatataatgcaaccggagggatttgtagcaaaaggatgcgaagataaagtttacaagctcaacaaggccttgtatggtctaagacaggctccaagagcttggaatgataagcttaatcaagtccttaaagaacttcagtttgaaaaatgcaccatggaaccgtcggtttatatgaagcatgtaaagcaagacactcttctcattggcatatatgtagatgatatttttgtctcaggaacaaatattaagattatagagaagtttaaagaggaaatggcgtcaaatttcgatatgagtgatcttggtaaattgacctactatcttggaatcgaagtttgtcaacacaaagacgggataaatttgagtcaaaagagatttgcggtaaagatacttgaagaagcgggtatggcagagtgtaatttggttcatacaccaatggaagcaggtttgaagttgtcttaagcttcaaaggaaaaggacattgatgccacaagctacagaaggaatgttgggtgtctccggtatttacttcacacaagccccgacttttctttttgtgtaggtgtattgagccgatatatgcaagctccaaaggtatcacacagagcagcaatgaagcaatttttacggtctttgcgaggcaccactacacttggactcaagtttgcaagatcaacttcaatggatacaaagttaataggatatagtgatagtagtcataac

SEQ ID NO: 192282 - DNA, 198 bp, Arabidopsis thaliana landsberg
atggaaggtgcacgccaagtgttcgatagaatgcctgagaagtctattgtggcgtggaattcgttggtttctggatttgagcaaaatgggttggcggatgaagcgattcaggtgttttatcagatgcgagagtcggggttcgaaccggattcagcgacgtttgtgagccttctctcggcttgtgcccaaactggtgcg

SEQ ID NO: 192283 - DNA, 101 bp, Arabidopsis thaliana landsberg
agaaatcccatcgaacatccgtctacgtgtgtccaatcacggcctacgtgatgctgtccttcatacgacatctacctaacttccgacacttgggcttatgg

SEQ ID NO: 192284 - DNA, 470 bp, Arabidopsis thaliana landsberg
atgaggtttccaaccgatcttcctagagcggttcgaaacagcacgactgtctccattccagcttctacgaccagaatcaccatacaggaattgatcaacgatgtccttttcgaactcagagatatcagtggactcaacgagcccgatctttttcagttcggaagcgatgagttcagcggcgtggtaccatgtgtgttcatgaacagcgccgaaataccaaccgccttgcttaccgtgctctatggtgccggagagaaggccattgaggagcaacaaatacaggtcagcgaggtcgtggatgttgacgttggcccagatcgtgtccttgcgcgggccgacgtagcctgccttctttcgggctgcacttgctcttgccaggttgatcacttgctgcgatgtccttttgaagggttcactaccaattccattgatggtcgatggtgcaatgatcgccgtagtcaaatcttcag

SEQ ID NO: 192285 - DNA, 707 bp, Arabidopsis thaliana landsberg
atggcagcagttgagccaatttcgttcaagatcacgaatcgttgccggaacacgatatggcccggtttgctctctggtgctaactctgcgccgctccccacaactggctttcgtctctctagaggaaaatctaaaaccgtcgcaataccagagtcgtggtccggtcgtctctgggcacgaaccttgtgttcacaagatcggagttcaggttctttcgtctgcttaaccggagattgcggctcgggaaaagtcgaatgttcaggctccggagctaaacctccagcaactctcgccgagtttactctcaatggcacaggaggactagatttttacgacgttagcctcgtcgacggttacaatctcccgatgctaatcttgcccaagaaaatcgtcattggaggatgcggagccaccgggtgtctcgtggacttgaacggcgcgtgtcccagagacctaaagctggtgacgcgtgggaatgggaacggtgttgcttgccgtagcgcgtgcgaggcattcggagacccaaggtattgctgcagcgatgcgtacgccacgccggacacgtgtcagccttcggtttactcgctcttctttaagcatgcgtgcccacgagcatacagctacgcctatgacgataagacgagcacttacacttgcgccaccggagccgattacttcatcatcttctgtccgccaccgtatacaag

SEQ ID NO: 192286 - DNA, 195 bp, Arabidopsis thaliana landsberg
atgcttgttcataagatctcgctgctggaggaggatgtgaagtatgtgaagaaacaactcgaaaaactggattctatggagaaacagatggcaaagttggatgtgttggaacagtgggctaaacacatgatggagactgaacgtcgaacgttgtttgctgagaaaaaaccggaggaagaaactcaagcctccaga

SEQ ID NO: 192287 - DNA, 196 bp, Arabidopsis thaliana landsberg
accccacaccttccgagttcgaaacgccaccatcatagtggcaccgcttgtggccgccgagagcttgaccggtggcgaaagatttcccgcaaaccgaacaaacgtgagatttcacggcggtggacggtgtcgatttatcattatctccaccaccgtagaaactccggtgactcgctttgtgaccaccgagagcttg

SEQ ID NO: 192288 - DNA, 941 bp, Arabidopsis thaliana landsberg
atggctgacgctgatgagttgatgaagacaacggtgtcaagacacagtcttcatcggtacagacaaggtacggatcttcggtacgtctactcagaaatcccgaactcactagagaacttaggaggcttaaagacaataaccttaatcgaaagattgatcatgatgagaagccggaagagaaccctattcttcttaatgaaccaaagatgatacctcgtatacggatagtttataaacctaaagacgatgtggagagaaagatgaaggaccgtttagaagcgaaacagaagttgacagagttattgaaggctatcgaggagagactaactcggtcggaattgagagtttacacttgcttgtgtaaagactttaagtctcatagaatcgattacagccaattcgttaagtctcttcaacgtttgatcgagaaatacaagaatctttatcaacggttcgtagacattgcctacggtcatggagaagatgaggctggaactagggttaaagttgatgataacccccaagacacagagtcggataagatcaagttggagggaaaggggaagagaggaatgttgcctccaaaggaatcagaccaacctgagagacctctgaagaaaaggagaaagactgaacgagcgacacctaactataagctaattcccaaggaagaacagacaccggtctcgtctacagtactaaacaacacttgggttgtgaacagttatgatatccaggcacagaaaaacctaaccgatatcgaaaaagatatttacaactgggaagatcagatgttcgagctagatatgttggtgggatttctaacaagtgcagcgaagaatgcagaggaagttattaatggagagagggacctgaaagatcttgagggaagttctacagatgtgcagacaatttatatggtagagatatgcttgaaatag

SEQ ID NO: 192289 - DNA, 70 bp, Arabidopsis thaliana landsberg
gattggaatcatagtcttgtgtggggttgatcaacaaaaggtgttatcgattgtcgtagaaacaatttag

SEQ ID NO: 192290 - DNA, 690 bp, Arabidopsis thaliana landsberg
atgaagaaacagcaaaaaccttgcatgccatggaaggtgattcatgatatatatatatatatatatatatatatatatataatcatacgctaaaaattataccatttctgtagggttttaccatcacttttttttttggttagctatagctcatttataattggactttaatatgcacaagattttttcgttgctttgcaattgcttttttaattattaatgctaacgttcttttataattttctatgttttcttcaatctgtagaaaatcctccgaacattcctcagtccgatgttccttcggtaattccaactctatacaaggttcttttatataaagtctttcgtttgaattacttattctttctaaaatttaagaattgacacacacacaagttgttcatggaaaaattgattaaatttggcaaaaaaattgcttttaactaaatttcagactagtagggacacaagtggccttaacgatggtgataggcgtcaggatcagcctacccttgttgttaaccaaactgctattgagaacaacaatcccggaaatgggtcaggagaatcaaccgaggtagtcaataaagaaggattaccagaaaatataatctccgggttaccaactcaaaagtacagtcgcaaaacttggtggtggtcaaagaaaacttttgttcctgatagaaaaga

SEQ ID NO: 192291 - DNA, 128 bp, Arabidopsis thaliana landsberg
tgaagaagtataatcctcatggaggaattgaacaatacaagatgggaccaaagagaagaaagaaaaagaagtattatttggaaatggaaatttcgccaagcaatcagcaactttattactcgttctag

SEQ ID NO: 192292 - DNA, 348 bp, Arabidopsis thaliana landsberg
atgaaaaccctgctcctagcccttgccctcattcttcctctggcctcggaagccaagaaatccgcgcccctcgtgaaccaggtttcacgcacccgcttcgaagtgagccgcggggccgtggaaagggaaatcaaggatccccaatcccagcttggcaccttccgggcgttaccctccggcttttttaatggaatcaaagtgagccacttcaagaaaaactgcctgcttccccgctttggtatccagagcggcgacgtggtggaaatggtgaatggtcagcccatccgcactcctctcgacgtaatggaaattggccagcagctggccaaagcgaagcccggcacaaaa

SEQ ID NO: 192293 - DNA, 980 bp, Arabidopsis thaliana landsberg
caccgcggtcgagtgaattactgacatggagacgttgtgattgcatcattcgttatactcgatcacatcgtcattcggtccctgtagagtgtggtcgagtgatttcatggggtggagaagccagaacaatgtcgagtgtccttgattgctttgtggtcgagtgtattgctgttctctcaaagctagaatccgtttccctcaaatcttcatacttatctcctgaaaacactaacaaaatgcatcaaaaaacaagggaaattaaggatatgtacaaagataggcatgggacttcctcccaagtgagcttgttctaggtctctagcttgactcctcatactcattaagaagaaaatgggtgatagagacgattgacatagtcctctcggaatctcatcttcgaagaatatgtttcctatttttgcacattccctttgttctttgattctttccacttggtgcattggaaaaaagtttatcaaaacctctcgatggaaaaatatagtgttggaaatttcatggaagtaacacaactttattaccatgtgttatgctaatgcagcgtgggaagacttgtccacatcgactttggtttcattttggaaacttcgcctggtgggaacatgcgattcgagagtgctcatttcaaactgagccacgaaatgactcagttgctagatccctcgggtgttatgaaaagcaaaacatggcatcagtttgtgagcttgtgcgtcaaggggtacttagctgctcggcggcagatggatggaatcatcagcacggtgcaaatgatgctagaaagtgggttgccttgctttagcagaggagatccaattggtaatcttaggaaaagatttcacccagaaatgagcgaacgtgaagctgcacacttcatgattcatgtatgtacggacgcatataacaagtggactactgctggatacgacttgattcagtatttgcaacaaggcatcgagaagtaa

SEQ ID NO: 192294 - DNA, 613 bp, Arabidopsis thaliana landsberg
atgcctaatcaacaaaaaccaacattaggaatgaggtgcggaaatgaaaatgtaaaactaatcaacaatgaatagctttgtttttcttgaaatgtactgtttttacggttaaaaaaaggggtatttgttgcactacaattttccttacaactaaattttcttatcaaatttattttattgatgggttacccattaatggacatcttatacttaatactatctgagaagacaatttattaatttccctttgaagtttcaaagtattcacgatataatgcatttgacataaaaaaatttgaagataaataaaaatatccgctttaaaatacgcgaatctaaaaatccagttgcaaaaaattggatcctagcttttaatcttagccattcaattatccgttgatttattattttaaacggattgcatcacagatttacaaatgcttcattgtttgttcacattgaaaacatattttcttttttatataataggtctttaaccttttgcagattgctgcatgtggtgtacttttttctggctctaaatgagtgccttgagaaggcaaatcatttcatagagtcttacgagggaaacaaggatcataaagaatgtgag

SEQ ID NO: 192295 - DNA, 385 bp, Arabidopsis thaliana landsberg
atggaagcctactgcgatgaggttcgacgcctggaggacaagttctacgggctcgaacttaaccacatcgcccaacgatacaacgagactgcggacgagctggctaaaatagcctcggggtggacaacgcgttcctccggacgtcttctctcgagacctacatcaaccctcagtcaagaccgacgacacgcccgagcccgagaaggtctcgactcagcccgaggtgccctcggctcagcccgaggcaccctcagcccccgagggtgaggcactgcgtgtcaaggaagagcagaatggggtcacgcctgatcgaaattggcagaccccgtacctgcaatatctccaccggggagagctacccctcgacagggccgaagctcggtga

SEQ ID NO: 192296 - DNA, 343 bp, Arabidopsis thaliana landsberg
cattgaaaccggcaacgcttgtgcccgtcgaattgcgatagacgttgataatgtcagcaccgctaacattattctggaaaacaccgatataatatcggtcagccggatcagcaccgtcaacgcggacggctttgatggctttcgccaccgcttcattgttcgttgtccaacccggaccaaccggcaacacgccggtcaacgcgtacggatcaagccaaccggcacgcaaaagcttttcgtcacgatcaacgtcaaccttgcttgcgaccgtagggggcagcaacgggctaatccaaacccaagccgatccggaccagccatagacgccattgccgttcgtcac

SEQ ID NO: 192297 - DNA, 476 bp, Arabidopsis thaliana landsberg
atgaagtgttgctctgtcaaaagaaaggatctagaaaaacattatgagaggatgttaaaaagattctacgctttaaacagtatagacgatgtcaatctcaaacagacgtatttgaattcattaccagagccacttggaaataaaacttcacggttgttatccttcaaaaatgcaacagttgctcaagcctcattaggagaaatattccagatgtctcttgcgacactagaaaagctatgcaatcaccagaagttcttcaagcagatgcatgaggaaggaaaactactaaggagagcatgtgatcgttcagatttctctataaaatgcaaagagaagaagtgtggatgttcaacaaattatcagaaagaaaaaaaattcaagaaaaaatggcagaagaagtatcctcatctgtctagcaaaaagaagtggaaattcttcaggaaaaagtcacaaagagatttcaagaaatcagacag

SEQ ID NO: 192298 - DNA, 104 bp, Arabidopsis thaliana landsberg
gcggacgatgccgcgccgcgaattactgtgccagtacaccaaatttagcgactgctattcctgtgtcaccgacggcgcccattcgccttgatgcaccaaactag

SEQ ID NO: 192299 - DNA, 144 bp, Arabidopsis thaliana landsberg
atggggttcgagacggaactgactgtccaagcctgggcaatgctgagcccagcagtccctgccctactgggtttggggaggttgataatggtgttcgaggtccagacccttgagcactgtgaaagggcgaccaaaaaagaaaat

SEQ ID NO: 192300 - DNA, 670 bp, Arabidopsis thaliana landsberg
tctctacaaagtgttgtcttcaaagaggtacccacatgcgctattttttttttgttaacttatgtatcactaccgttctttaatgggttatatgtgcacctcttactacttgaaattgttagtaatcagcttgtttacaggccggtacaaaagatcctgtcacgacgatgatcagcatattcttgcggttgtttgatataggagtagatgctgcactcctctcacaggtttgcgttaccttacgttgctattttctaatgatagagtaattaagctaaagaaatccaatctggacgttttttcttctagacttgaaagtatttctagacttgaaagcctaaagcatttatttcttcaatattaagtcactatctctaagcctttgatgggatggaaagttagatggttaaagagatcagagctgtcctagggcctagttatattccaaactatttatcattataaagtaaaacatatgctgaattctctcaacttttctgcgtctggtttgctagattgtgagacttatctctaattctgtttctttctttcttgttcgcagtatatatccctgctgttcattgggatgttgattgtgatttctgtgaggggattcctgacgaacctgatgaaggtgaattatgattctcgtttttcgattttttcattg

SEQ ID NO: 192301 - DNA, 220 bp, Arabidopsis thaliana landsberg
atgcgagcccatagagagaacaagagagaagaatgtggccgcgcgctcatatcatctgcattacctctgctggtcggagggtggtctagaagtctcatcgggtcgtgctatctccgggcaggcccggtggcatgggccatgtcgattgctcgtcggagtttggagttcatggtcgcgccacgctatgccatgaacaggcttctctacaacgtaatcaccg

SEQ ID NO: 192302 - DNA, 564 bp, Arabidopsis thaliana landsberg
atgaccacaacggagagaagcctgtccaagccgcgtgaaatcgttgatgagtacattgatgctggctttcaatcaatattccttcgtcccttgtcaccgtatgggtttgccatcaagacacggcaaatggagcgttacgatttcgagcgatttttcacgttctacaaggaagcgattgactacattctggagatcaaccgcgctgggctgccatttgtggaggcgtattcctctatagtcttgaccaaggtcttctcggggaagccaactgcctatgttgaccttcaatctccctctggaatagtaacgggggcgctggtgtacaactacgacggaggcgtgtatgtcagcgatgaaggaaggatgctcgccgagatgggtgatgacacttttcgggtaggtgatgtgttatcgagtagttacgaagaggttctacttaaccctgtttttcatgccgcgcttgaggagtcgctgatagaaggcgctccggagtgttgtgagtgtgctttccagccgtactgtggcagtgatccggtataccattatgcgacgcaaggcgattgg

SEQ ID NO: 192303 - DNA, 16 bp, Arabidopsis thaliana landsberg
atgcggttcgaaaccg

SEQ ID NO: 192304 - DNA, 137 bp, Arabidopsis thaliana landsberg
tgacactcgcttggcatgtacactttgcagctcgtgtttactcggaaaacaaactcgacaaatgtttccacaagcaactacctatcaagcaacaaagatggttgaacttatacacggagatgtatgcggccccataa

SEQ ID NO: 192305 - DNA, 568 bp, Arabidopsis thaliana landsberg
aaccccttcgattaaataccttaatagcagtaactccttgcttctcttgtcagtacatctctgtaaatccaaccataatgttttgcagctcgaaacctcgtaagcggagacaaagaggtggcagaaataacaccaggagacttaaagtatgctttttaccgttggattcacccagtttaactaatggcacagaaaatggaatcaccctacttaatgatggtaaaatcatatcttcttctgtgcgttccttgtggcttagaacttcatattacagaagaagatacaatggcctgattgtttagtttttgtacttctcctcgcattcttcttgcgagggtattgttaccagaactgatgtacaaaattaatggcatgctacaggaaaccgtggtttaggatatcccgaggcaacagagcttgctggacaatttgagatgaccagcaacattccaccagccatagcccactcttctctggacgctggtgctaaagttatattgacaagcgaagctgtggtccctgctactaagacaagaaagttatctgctgagcgatcagaggctagaag

SEQ ID NO: 192306 - DNA, 1830 bp, Arabidopsis thaliana landsberg
atggaagaacatgaagagaaagagatctggttcatgtcaataaggagaagtgagatgaagcagatcttagtaaaatcggagagtgggcaaagcaaagaaaacagaagaagagaaaagaggaaagaggaagaccagtttcaagaaggtttattacaggttgaattcccgacagaccagagggtctcagataaggaataaggtgtatatggaaagaatacgctcccaaaaatccacatcaaccgacagatcttcaatcagatttaaactcaagaagttatgcacgtttctttctggccaagtaattgcaaagtatgtcaaacccagaaatccataaaagacaacccgagggagctcgttctcggcaacgtttggaggtccgaaactattctgatctggatgcaactttgtgcagacgttcatggtactactatctacatattcaacggtggatcacgtttctaacggttcgttactgacttatgcatatgtttctgagacagttttgtatggagtaaaccatgacaagtttttattgtttgaatgggaatcgggttcggtttgagctgtgaatttgcaggagccctatggagtaaggttttggttgatggagaactaaggtggagctcaagaatatgcagttaaagctcttatactaagttggtctaataggagagaaaggagaatagaaattttcttcattttcaactaggctaaggtgagggtggtatttgcgaaacatggtatcattatcttttgttttgcttcttgacgcatgatatgtaggcttagatctgattgcataggataagattgtgtgatgatatgatttgatgattattgtttgatatgtatggtgatgatgtttgactatgatatattatgtatgagaatgttaagtataagtatgtatgtatgatgattatgtatgtttgtatgaaagactggggagaatcgagctatgggccgtggtctccctagtgatgtggatagtgataggctgacgggttacatgcaggtcaagaccggctgacgagcccgcaatgcatgaaagtgtttgagccacgagggccagcctccacttattaggttcaagtcgtcacgaggatgactggacctaacgatgtgtatgtttatataatatatatataagatgattattataaatgtgatattagaagttaaagcatgataggttgattgcgtgtgtctaagtttatatgttatgaagatggttgtatagctttagaaagtgttctatgtttcagtgggcagagttgattcccctcactgagtattctttactcaccctttctttttcctttttttcctcaggttagtaagcgtgaggagttacttatgtccaatattttgctcgtgtgagaagtttaagaaaacgttttggcaagatcagatgaataacatgtcgttttggcctatatggcgggacgggtgttccatttggtatcagagccggttaaggccactccggttctgacccggagggtcagatttttagaaccaatttaaaaaaaaaagattttgaatgattaattatgtgtattgcttgaacttgagattgatttctttactgcgttgagtaatcttttgttgattgagttttacatatctgcttagttcttttcgggaagacgtaattgcgtttcttttgataattgaaatgtaatttggattctcatgttttcttcgctttagtatggtgttaaaaagtgtcaagtaagaatcagtgttcaagatagcaatgaaaagctaaagagtaaggttatcgagaaaggaaatggaagaaagtattatcggagaataagagcttag

SEQ ID NO: 192307 - DNA, 216 bp, Arabidopsis thaliana landsberg
atggttgtgggatcaagcactcatgatgacgagaactcggtaactattcttctagagactttttcaagagaccatccaggtgaaatcgacacacaaatcagtcgttctccttgctcttacatttttcatgatccaagaacagtgtgtccaactttaaccttatgtcgagttataaggtcttgtgacggtttggtctgcatccaagagttaattaag

SEQ ID NO: 192308 - DNA, 2322 bp, Arabidopsis thaliana landsberg
atgggtccacccctatctgacggtcagtgcgctacgtctggcaggctttaaagatttgttaccgaccctacaaatcaccacatgatctttctccatgcttttttctcactcggatgattccaacaatcacttttgggaatgtcgtccatcctaaaagcgctctaacccaagcacgcttaactgtagagttttctcaagacgtttgacataaaagataagttcactttactgacataggtggtcaaatcaatttttataaatctctcttcatacaccaccatattcctgaagttggggtgttacaattcacctccactaagaccataaccaatggttacctctatatttttctctattttaaaaatgattatatttagaggcattggagcaatggtcacctctaaaatagagtttcttaaaaaataaaggaaaaatagagataaattgtagacatttctatttatagagataaagaataaacatccaggagtttggtgaattagaccatcgcctactttattggcaaacaatggctaatactgaatagctcactttatttccagaatcagagacagatttccaggagtttggtgaattagaccatcgccctcttgtgacaaacatctcaacctataaggaagagagacatggtttcttcagctatgacaatcgcctcactcataaagagggtttcaaagacattgtgcttaacaactggaacagatacaatggggtcgatgataatcatgttcccttaatggagaagctcactcattgtagaaaggttatctcaacatggaagcaacaaaataagatcaatgcagcaaagtgaatcaaaatcattcagcataagctggatagagcgattgcaactggtggctctactttgatagagggaagacatatgaaaactgatcttaatcaagcctatatagatgaggagatctattggaagactaagagtagaagtcgatggctaaacacattagagtaatctctaggatagtcaggtagttaagatttggttagatcccttctggattcgttggccctaatggttatttcactcacttcagtttggaattcgatcctaggtattccagcgtccaaaaaatgttcaaatggatgcatgatctacgaattctagagatttgtagactctagcccaagtgattggatgtttgattctaggtacccatttcagagctttgcgataagttctccttgatataaccctatttttactgcttttagttatgatttaggtataggttttagagtctatttcttatttctatagtcttttctagttctttacaggtctttacatgtttgggattcatttggagataatggagcattctggaggaaaactttgtgaagacgttcatgttactactggctacatatgcaacggtgggattacgtttctaacggttagttctcgacttataggtatgtttccgagacagatttatatggagtaaatcatgacgagtttttattgttttattgggaaattgagcttggcttgagctaaatctttgtaagagttttccttaatcatggactcaggtcttcaggtcttggttgaaggagaaccaagttagagcttaagagcatgtggtcgcagttgagatgataagtttgtctaaatgaggaaaaaggaaaagtgtgttgtcatcttcagctaggctaaggtgagggtggtatttgcgaagcatggtatcattttcttttgttatgctttttgacgcatgatatgtaggcttagatctgattgtatatgataagattacatgatgatatgactttatgattgttgagtatggtgtttgataatgtgatgttatgtatgatattataagtatgtttatgttaagtataagtatgtatgtatgatgattatgtatgtttctatgaaagactgtggagaatcgaggtatgggtcgtggtctccgtagtaatgtggacagtgatgggccgacgggttacatgctggtcaagaaaggctgacgagcctgggatgcatgggagtgtctgagccacgagggccagcctccacttatgaggttctagtcatcacgaggatgactggacctaacgatgtgtatatttatattaatatatatataagatgattgttatgaatgtgttgttagaagttaaagcatgttaggttgattgtgtatgataaatctatatgttatgattatggttgtatagctttagaaagtgttctatgtttcagtgggcaaagttgattcccctcactgagtattctttactcaccccctcttttcccttttttcctcaggttag

SEQ ID NO: 192309 - DNA, 374 bp, Arabidopsis thaliana landsberg
atggcagtgaataattccaagggaaacggtttcattccaagagctaggcaacttggaaggcctgctgatcagccacttgttgatataacaaatcgcagagatacagcttatgcaaacaataaacaagacagtacccaaaagaaaaggctgggaaagacagtctccgtttctcctttcaaaaggccaaggatttcatcctttaaaactcctttaaagaaaaatgctcagcaagcttcaagtggtaatatatacgattaattttaattttaattttttgttaatctaattggttggttctcagatttataattttggtgtcctgtctattatcaggtttgtctgttgtatcgtgtgatacacttaattccaaaaag

SEQ ID NO: 192310 - DNA, 88 bp, Arabidopsis thaliana landsberg
atcttaccaagcccaaaagggaagggaatatgaagatgaacgaataaggagaaagagaaaggtagaaatagagagagaggaaggttga

SEQ ID NO: 192311 - DNA, 150 bp, Arabidopsis thaliana landsberg
aagaaaccggaaaacaacaaaaccctctacccgaaagggaggtttttaaagcactgtgccaaaaagccatcgttttctccagaaacccatcagtttcctctgaatcctgcatgtgaaagtttggtgaagaaagaggagagagatctgtga

SEQ ID NO: 192312 - DNA, 316 bp, Arabidopsis thaliana landsberg
atgtattcaggttattatacctttgaacattctacttatcctgagccccagccgaagctggagagcacggtcgcaggctgtaaaggtgggtttccccattcagaaatgtccggatcaaagggtgctcgcgcctccccggaccttatcgcagcgtgccacgtctttcatcgcctctcaatgccaaggcatccgtcagaagcccttatgcgcttgatcgttctcagcaaaactcatgcgtggggacggtttgtcgccgagctgtacgaagagcccgacaacgcccacacatgcgctttgtctttgatgttttctcaag

SEQ ID NO: 192313 - DNA, 335 bp, Arabidopsis thaliana landsberg
atgtcattaagaagcgcgatcatatcagatgatcctatcattaagcactacgcgttatataatgattggatcgttatcatttatcaaattcttcttatcgaaacgaaacttcgtggaaatttacaaaaggacaacacaagtacgtggtggtgtcacgggggctgtcgttactctaaggggccaacactcacgagcttccaacttcgatctatattttcttaaaaacaacaataactcatctcgacaacaaaaaaacactaataactgacgtggaattaatatttggttagtgatttctggcaaacattttttttttttggtcaggcctacaataa

SEQ ID NO: 192314 - DNA, 916 bp, Arabidopsis thaliana landsberg
atggaacacttcctcgcatctcaagtagatatcacgcatgtactttccatgtatccatccatcattcttcctaaaacaactattattcctcaaccagataagatggtggacatttctggtgatgaagcatctctgtcaagaggttcatccggcatttcagatgatatggagtcttcatctcctcgatattttttggaatctgaggacaatgcagaccttgaatctaagaaaatgagtcacaacactttgatggctcttataaagtacttgctgaagaggaggccggctgttatcgagaaggccacttctgaaggaacagaagaggtcatttcggatgctgttggtaaaacttacggggcaaatgattcatctaagtctaagaagtccagcaaggtgcagatgatttatcttccgcgatacctaattgatgactagttcttggatattaacactttataagcttttgggagctactgactgactaattccttggaagttgatgcatggataatataagcagcttcccttgatttgtacgtttgatagtaatttgttggggacttaacatctttttttctgcagggacgtggtatgatccctcttaattcaggtgcaagagagatggcagcaatccttgatacagctcttctccaagcacttctacacactggccagtctggagctgctatagagttattaaagggtgtcaactacagtgacgttaagatttgtgaggagattctcatgaaaagtaaaaattattctgcactattagaactgttcaagagcaattcgatgcaccatgaagcccttaagcttcttaaccagctggcggatgagtctaaaacaaaccagtcacaaactgatgttacacagatatttagtcctgagttgatcatcgaatatctcaaggcag

SEQ ID NO: 192315 - DNA, 364 bp, Arabidopsis thaliana landsberg
atgctatgggggtcattgagtcaatctcaccgattgggaacattcctgttgctagggaattggaaagtgactatgagagtagataccttactttcacaattaaagatactctgtaagtttaaaatactacactacatgaattatttatttatttagacatgaattgtccgtatgatctatatatctcttggtttatttatttagttcatttcatattataggtcccagtacatgaattgtgttgctgtaggagatacatgtaatgagtttgaaagaaaatggtacaagaaaataagtgatgtggattttaagatggagcctgtgataattattctgcgtttttggaaaatttctgagtttgaag

SEQ ID NO: 192316 - DNA, 172 bp, Arabidopsis thaliana landsberg
gtgttgtatagcgaggagcagatatggacaaagattgaggcattaaggaaggtagttggatataacgttacgaggagcacgacttattcagaagaattgaaggcgctttacatgttcacgggtgtggaattgccgacatcaacgttggagaatcaagatattgcaaaagtca

SEQ ID NO: 192317 - DNA, 144 bp, Arabidopsis thaliana landsberg
tgtctagctaaggcggcaatcggggacctccccatgagccagggcggcgacgtcctgcgcagactggaggggactctttttgaggcgaatgcggagcgatccggaccggctcaaaaaactcgaaagaggcgattgacaccctga

SEQ ID NO: 192318 - DNA, 163 bp, Arabidopsis thaliana landsberg
tacattccccagatgccgaatcgccggacaggtctcgcttattctccgtcgcactcgaaacttcaccaccggcggtcccaaaattcgaaaccagaaagtgtctctgtcttcgcctccatctctttcgtccagtgctaatttaaattttcgacgatttgattaa

SEQ ID NO: 192319 - DNA, 1042 bp, Arabidopsis thaliana landsberg
ggcatagtggtcaccccaagttaagtaagcatgagcatgttgcaccgccttaagtcgttgccgacttaagtcgattgctccgtttgtagggcatagtggtcaccccgagttaagtaagcgtgagcatgttgcaccgccttaagtcgttgccgacttaagtcgattgctccgtttgtagggcatagtggtcaccccgagttaagtaagcgtgagcatgttgcacctccttaagtcattgccgacttaagtcgattgctccgtttgtagggcatagtgtcaccccgagttaagtaagcgtgagcatgttgcaccgccttaagtcgttgccgacttaagtcgattgctccgtttgtagggcatagtggtcaccccgagttaagtaagcgtgagcatgttgcaccgccttaagtcgttgccgacttaagtcgattgctccgtttgtagggcatagtggtcaccccgagttaagtaagcgtgagcatgttgcaccgccttaggtcgttgccgacttaagtcgattgctccgtttgtagggcatagaggtcaccccgagttaagtaagaatgcgagtcaatcataaatgagccaagtatctttgaaatctctctttattgatgacatatttccattattacagagtacatggtgccccggcttgttttgaaatacagctaggggtaaaactttcggaggtgctctatgttccaagagttcccaacttctgtgccatccatctgggtgaggcgatacgatccgggccgagtgacctctgctactatgaatggcccttcccataagagtgataatttgtgccgtccctcccccgttagaattcggcggaggacgaggtcccctactgaaaagaacctttgccgcacagccttatcgtgatagcgccttagagtctgctggtatcgtgctgattggattactgcattcagtcgttcttcctcaagtacatcaatatcctccagcctggtggcttcggcttctgctatgctttcgaagatcaatcttggcgccccaaacttgagatcagcag

SEQ ID NO: 192320 - DNA, 99 bp, Arabidopsis thaliana landsberg
atggggaaacttaatatgtctatggactatggtttattggtttttattgttgtcatctttgttaacgcgagtgaacccgttccatcatttgctgtggaa

SEQ ID NO: 192321 - DNA, 138 bp, Arabidopsis thaliana landsberg
atggaggcaaatctcgatgatctgcacacaactatggaagaacttaagaatggacgagatgatttgttaagaagagtttccatagaagaagataaaggtttgcaacagcttgctcaagtcaaaggatggatttcaagg

SEQ ID NO: 192322 - DNA, 158 bp, Arabidopsis thaliana landsberg
ctactacgcccatagatagaaataacttcttctcacctccaatttcatcactgatttcacggaaatgccatcccccgattcgatacgacgaagaatcggggaatccaaaggaatctgatacacacaagctgaagaaatctctcttgatcggaggttaa

SEQ ID NO: 192323 - DNA, 354 bp, Arabidopsis thaliana landsberg
attaacgatgccacaaaatcttatcaatttccattatggatgttggatttcgtgcaaggttctaaccgtaattatacaacttggcctatataccactcacgaggatattgtcttcacacgcataactatggaaaagataagaaaactcaaaattacggtgtctatgttcgtggaaccactaacacggattattatgggttgatagaagagataatgatgattcaatatcatggtgttgttgggttaaaggccttggttttcaaatgcaggtggtttgacacaactatagatagacgaataaggaaacatccatcacgtcagaattcaatcttcttaagagcttttgctctttga

SEQ ID NO: 192324 - DNA, 362 bp, Arabidopsis thaliana landsberg
atgactacctgtagcccggcttcagcgagcgcggccgccatcgcgagcccgagtccctggtcgcgcggttaccaagccttgtccgccatttcgtcacggcacgagcctatcgggcccttccgacgccgccgggcgggaaccagccccaaggctggcggccggccggggggcgaacccttctgcggttgtactaggcggcggggccgctggtcagcgtgaccgtcgaggtgtgcgactggccctcggtgtcggtccaggcgatgctgaccttgtcaccggggtggtagcccacgaggacctgctggatgctctcgctgctgccgaccgacttgcccgcgaccgaggtgatcgtgtcgccgtag

SEQ ID NO: 192325 - DNA, 405 bp, Arabidopsis thaliana landsberg
actttgttgactccgtgcaaagaggctggaatcgaggccgatcagatagtcatggtggatactatgagaagctccattgttgcagacaagaactagcaaagtggaagagaagaacaaagacgaatactgcggagaaaattgagacgctaaaatatagagtagatgcggcggagagggaccacacgttgccacaccaaacaattcttcgactcagacaggatcttaaccaagcttatagagacgaagaactttattggcatctcaaaagcagaaacagatggatgctactaggagatcgaaatacaatgttcttctatgcctccactaagcttcggaaatctcgcaataggatcaaggcaatcactgatgctcagggaatagaaaacttcagagatgatgctatag

SEQ ID NO: 192326 - DNA, 189 bp, Arabidopsis thaliana landsberg
agtaattgtttgcgtattaggcaagtggattgcaaatacgaagaacgcaaaaagaagcgagaaaccaaagctgcagctgcaagcaagcaacgcgcttcaaaagcaaaacccaaaggcacaaaacgccgtggtaaagccccagggaagaagcaagctccagggcaatggcagaaacggcgccgaaaatag

SEQ ID NO: 192327 - DNA, 63 bp, Arabidopsis thaliana landsberg
cttcccgtgcaaggtcacaaacttgctctagctgacccaagtcatcatgctcctgtatggtga

SEQ ID NO: 192328 - DNA, 309 bp, Arabidopsis thaliana landsberg
ttgttactcaatgcagtacaatggatcaagcagtctcattagctgcgagaagcagacgattcgaatcgagtttttatccttgcaaggtaaacctaaacacacgacgtgatgaggcactccgtccccacacacatcaaccgtccccatcgattccctggcaacagatcagggctcaccgccttggcgtacaatgcctcactgacaccgactgccgtcgtgcagtgtccgcacttgtacccaccataaccggaatgggagaccacgtctcaggtcgcgtgaggggatatgtctgcgggcaggttcactcag

SEQ ID NO: 192329 - DNA, 427 bp, Arabidopsis thaliana landsberg
caggagccccttcgacctgcgcgagaccggcctgatcaaacgtgatatagaatgcgatcccaagtccaggcaatactatatcattgaaaaaataggcaacagttatgaccgtgtgcctacttccatgagctttgaagagttctggcgcatacgctcccagcaggcagaatcggattacttccagcaccgtgccgaagcattgtcgagactcaacctcgaatcacccaggccgcatacccgtgttaacgaccgcctgttcgaccgcatattcggcacatcgggcaatggattgaaagtagatatcaaacccagcggagaagtgaatgtgatggcgggatgccagggacagaacatcaagaaccctactttacccgaaagggcgcgcaagaacggcggctttgatttagacatgaacgccaagctgaat

SEQ ID NO: 192330 - DNA, 453 bp, Arabidopsis thaliana landsberg
gatgaaagtaatgagaatttaatggagttttttgacctagtcgattattgcgctcacaagtttcgagcagcaggagacatgtactgtgcaaaagtttcaaaaaaattgaatgagatggcagctattttcgtagaggtagttttactctccttggcatgtaaacttgcctcaacttagtcatgaattatcttggtgtatgagttaatttataattgactggttggcaggcaataccccaacttaatttggttcttagactgtattcgaccgggctgtccatcacggtttgcaattccaagctcggagaaattaagctagaagattcaacagatgattggaagattcaagctatgtttgatgatgatgctagatggcaaagcttagtttctttactcggcatggttgatagttactcaggtgatgagggcaatcagactggttcatcatcgattg

SEQ ID NO: 192331 - DNA, 195 bp, Arabidopsis thaliana landsberg
gcaaagtcagttatagctaccaacaaagtggcaccagcaaaaaccacagcggtggtgatagcagcgtaagtgatagtttcccaattatagtgacagacaatgccaatgaaagctcagcagcgacgaatctggtcattctcatcgcagataccgccccagaagccaaagctgacacaggcacagtgacagaagacg

SEQ ID NO: 192332 - DNA, 351 bp, Arabidopsis thaliana landsberg
atggatcaacagaggcattcctggcggtgcgttgttgagatcgcctctcaagacattcttccacttcgtccggcggagaatccctgtaagcgcataatctatcatctccatgtccgtgttagacacggtgtctgtagactccctggagtaaaagacgttggcaaccgatctctgaaagtagcggatcacaggactccggatttggttgctcttagactgcgccgagtttagcggtagattgttccctatagtggcccacaaatccttagctcctctctgtcaaatctgggtttggttccctttccactagggaaaaccaacagttattccaacttcttgatcgaaagctga

SEQ ID NO: 192333 - DNA, 100 bp, Arabidopsis thaliana landsberg
atgaccatcaccaacgaaaatcttcctaccctagaagaaaaaggccagcgtaggcctgttttttctcaatgcaatgcacaacaagatccatctgctcaaa

SEQ ID NO: 192334 - DNA, 221 bp, Arabidopsis thaliana landsberg
atgtccggcacgacagcagtgcgtcaaccggccactactcttagctatagagaggatttggggatggtcgacgtaagtccgagtgctgatgtaaaaaagcaatgtgcatcttcaatatgtgcttttttacaactttgtagcaagcagtgtatcgatcaaaactgagctttccgtcctttgacgctgacagcgctttggttgattgtggaaaccatgcatag

SEQ ID NO: 192335 - DNA, 150 bp, Arabidopsis thaliana landsberg
ggtcttcgcgccgcggcccagcgtgacgacgtgatggcagtctctcgcatcgtcaacctcggcaacgagaaatcgaccaagacgccgaacggcatggcagaaaggaccaaaattctgtccaaactcaaattcctcttcgccatcgcatag

SEQ ID NO: 192336 - DNA, 157 bp, Arabidopsis thaliana landsberg
atggagagagatcacgtggaagattctccagatctaagaatgattatctcaggaaagaagaaggaaattcaatgctctgagtgtggtggttttggtcacattaaaccggaatgtgcagtcaccaagagagaagaaatgaaatgtcttgaatacaaag

SEQ ID NO: 192337 - DNA, 91 bp, Arabidopsis thaliana landsberg
gtggttggttgaaaactattttacttacaaatttaacatcaataaaagacacgactttaccatgctggcgggcacatcaaatcagaaggat

SEQ ID NO: 192338 - DNA, 243 bp, Arabidopsis thaliana landsberg
agaggtcgaagaatcgagaaagctatgtccttgcgaccgagcacgaagacagagatccgtcgaatccgttacaaagtctctgtagatgcggaagaaggacgcagaagaagagaagactttttagtcgagattcgcaagagcaaacgcaacgaaaatttgatgaagaaacgtcgtgtaaaagttttgcctcctgattacaagttgatttccaacgacccctttgagagtttggtaaaagtttga

SEQ ID NO: 192339 - DNA, 90 bp, Arabidopsis thaliana landsberg
gttgaaggtgcccaaaggcttggacttattgcacgttctgcaagaattgagtatgacaggctttatgggaccatacgcgggggctcgctc

SEQ ID NO: 192340 - DNA, 163 bp, Arabidopsis thaliana landsberg
gaggcagtcctttgcacttcaggttgtcgactgccagagtgctggaacaactctagaggcggcagatagttttgaacatgagctgccgttgactgtaaaggaggaatggcggcttctgatgcatgcttctatagctgaggagaccgttctgctgccggcgtga

SEQ ID NO: 192341 - DNA, 140 bp, Arabidopsis thaliana landsberg
ctaaggtgtggaggcaatacgctgatccacccattatggtaaaaatcctctatcgggttccacttggttctgcgtcgattgcccttcgatcgctttggattctcttcggattctctgatagtaggattttactcaattaa

SEQ ID NO: 192342 - DNA, 1887 bp, Arabidopsis thaliana landsberg
atgcactatttgatagcactcagcaaattggtgagccttttgatctcggttatcatgtcggccccttcgtcttggaattctttgttgttcataaacttgattgaaatgacaacactctggatattgcagctgaaaactggagcaggagatttccttggatatgagaaggggattgcccacctcagcaaagctattcatatgtatcctcatagtaatttgataaggtgggttttgataaagcgctctaggttttaattgtgtaatgatatgttggtatcgtaatcgtaactcggaaataattttttgttggaattaggaacctgcttggatatattttgttagctggtgaaggaatgaaagatgcatgtactgctagtagatgttgtatcataaatgtctctgagtgtgcaaataaggaaggtctgaagtccgcattggaggtccttggtggaggatcagttgcttgcaatgtaattggcaatacagctcctaggttctcatttccgacatgccattgtcagtatctgaatgctcctgttgttgttgtagaattgcaaaggtatttgagaatctttctacatcattttagcattttcagaatctgaattgatttactctcaaagtggtgtctagtcgtcctgttatcattgacaactcaatttttgatccactgtgctcagaatctttcgtatatgacagagagctaagagcataatactacagaaaatatctacacttaaacattttttaaattgtttttcaatacgcagattcttgcatcaagaaccttcgaacagcagtgtaagatacttgcttattctgaatctcgtgcagaaggcacgtgagcagagatttcctcgccagctttgtagggctattgagcgtctaatatctgtggcactctctgatgagacatgttcgaaagaaggcgaatataaaaaattccagcttctgctttgtgcttctgagattagtttacagatgggaaatatagcagagtccattaaccatgctcgaaaggcttcttccctttctcttccaagtagctatctatttctaggacatttacaactttgccgtgcctatgcagcaaatgggagtaccaaaaacatgcaagaggaatacagagcgtgtttggaactcaagactgactcaaatattggttggatttgcctgaagctcatagaatctcagtataatctggaacctgatgctaacccttagagatgagcctacaagaatgctcgagccagaagaagaattcatggaaagaatggatggctgtatacagtttagctcgtggcttagattctacagggaaaaaagactttttctcagcagaggaattccttgcacaagcttgttcgttgttaaattcagagagctgtctacttctctgccatggtgctgtctgcatggagctggctagacagtctaatgactcgcagtttctctcactagctgtaaaaagtcttagcaaagttcaagcgagttcattgtttcctttgcctatcgtttatacattattagctcaagcacatggaagtcttggctctaaagagaaatgggagaagaatcttcgtctggaatggttctgctggcctccaggtttgacgaaaaaactgttctaatcattgttctttcatatttcaccagaattgcataactgaaactgtttttaattgttggacagaaatgagacctgcagaagtttacttccagatgcatattctcgcaagacaatcagaagacagacctgaaaccacttcagggattgaaaactaccaaagtcctgagaaatgggtgattagggctattcacactgatccttcttgtcggagatattggaaagtcttggataagcttgttcaacatcccatgagctga

SEQ ID NO: 192343 - DNA, 476 bp, Arabidopsis thaliana landsberg
atgggcaagcaggtaataggctggcagccgggcggcaatttccctgagcaaaccattcgccagctatggatggatgacagatcgcacatggcatctgccggtaaagcgagatttattgattcaaggcacctgtatatgaatcatatggacccgttggaatctgttgtaaccatttataacaggcgtatcggcgacagggagcagggcgattcttccatgatcggcgccacactctgtttatggcacgacaggaatgtggcgaaagaagaagaccttttacggatgaacccggtatatcctgccatgctcgcatttgccgagagaagctggcgcggaggaggccgggaaggatggatagctactatcagccagggcgatgtggaaggcttcacggaatttgaaaaccggctgatggagcagcatcggttattctttcagtacctgcccttccctaacaggcagcagtccggtatcag

SEQ ID NO: 192344 - DNA, 483 bp, Arabidopsis thaliana landsberg
gacctatacctgattgggttttacccgaacccgaacccgacccgcttacccgaatgcccacccctagttttttaagtggcaaaaagtttggggtaaaaaattgagattgtaactagtatttgactaaaaattttggcaaccagatgtgtaatgagaatccttatactcatttgccttacccgacttaaaaatgatgtatatcctttgttagaagcaggtcaaggatattggtgtcaaacaaaagatattttttgtttgaagctgcgaaaatgatgaatattggcttcatcagttcttaaaaatattgtcgttcagtctaaggtcttccacatcttgaagcagcctaacaatgtcctgcacaacgctacttccctctctccgcattctatattcaagtgcatcaaccgcaaaatcaaaaatgttatcacctcaagaagaaacggactcctttttcgcaagttaatagcgttgtggctgctatga

SEQ ID NO: 192345 - DNA, 1519 bp, Arabidopsis thaliana landsberg
atgctttgcctttcggttgatgagtttttggtgttgtatactgttggctgtcttactcagtatctgtctgcttcctgtgggaaactgaaggttgagtcttctagttttaagaataccagtcgtttcatgaaatctacaaaagatcccagtagttcttctgaaggaaataagaagcacatgcgtgaagatgtgaaaactattctagacatggacccagcacagcgaatttccaaaacagttaacaatcatggcagtgatcaacatgaaggtatgctgcatctacaaaatcttttgagagaaatgtggttgaactggaacagcaattgcatgaagttagataaaagtacttttacaatttctgataagccttgtttactggttgatattaaaagctgtatggcatatgaggttgttggtaaccaagattccgagttctggaaatgcagcatggtgttgggaaagttggatattgtttttgaatattcatcgttgttttcattggctttgctaatttggcagatagaatgggctcagaagttacttgtagacgattatactggagaggtgcattcaagttctttggtaacaggcggggttgatcctgaaatggctagttatgacgaatatgggatctacaggcgcagtattgaactgtctttgcatagagttcatccagagagacagattcaggttggcatacttcttggtggcccccagatcaaattgttagttgagaaggctgaagaagtgaatactttaattgggaagaaagatattctattatttgatttccatgattttgagtttgttatctggccgacttataaatctgacgtggtgtcatcaaggatgtttcaagggcctgataacataagaacagataggcctttgcttcaggagctggggctaagtgatacggtgattccaagttatgaaaaatatgtttctcaaggatggaattccctgtcctcacacctaaggttttctggttttgattgttctttctgcaaaatggcagtaaagaactggagtcaagtttttgtagtgagacccgtaactatctgcttttcctccttaaggtatggaatttattgccttatattgctacatgtgttatactaagctaaacattgtctttgtctcgctgcttgatacatgttttggttctaatgtcatatgcgaactgttcgcccccataatttatcgctgaaaattgattctcagctgcatatccttcccaaattataggactgagcttaggtacttcgttgaactagttagtgtatgtccataagatgtttcctaactccggtgacactatatcatagaaaggagacttactattgtaccacttacattttatgcaattcaatacaatactgagagaactgcgatttattgcagagagaatgtttattcctttagcgaagctataatggatttctcaattggtttggatgtgtttgtgctgggtctgactattgtaacaaaaccggatgacctaaatgcttactttcag

SEQ ID NO: 192346 - DNA, 335 bp, Arabidopsis thaliana landsberg
gacggtacttaacggcaagaccaacattcaccctgcctgtcggcgacgtcgcctgggcggccggcgtccagtatcgccgcacctacttcaaggccgactacaacgacatcagcaacgcggcgatcaatccgtgcgtgaacacgccggacttcggcgtgaccacctgcaccggttcgcagcgcaacgggcccttcatgttcctgggcgtcggcaacgagtccgacaatcagagcaacgtgatcaccggcttcggcgagctgtccgtgccgatcaccgacgacttccaggcccagttcgcggctcgatacgagacatatggcggcgcgatcgactaa

SEQ ID NO: 192347 - DNA, 282 bp, Arabidopsis thaliana landsberg
atggcccggctgcggctcgaccccgggtgcagccgcgcccagatcgaggcgatcttgcacgggtgcgtccgccgggccgggttgcgggaggcgtacgtgtcgatgacctgcacgcgcggccggatggcgccgggcagccgtgacctgcgcaccgcgcggagccggttctactgctacgcggtgccgttcatctggatcagcagcccggaccgccagcaggccggcgcgagcatgtgggtcagccaggtcgtccgcatcccgtcgcagagcgtggacccgtcg

SEQ ID NO: 192348 - DNA, 603 bp, Arabidopsis thaliana landsberg
  unsure (1)..(603): unsure at all n locations
atggtagttatcatcatcgtcatattcgtaatcaccatcattgcccgtatcatcatcgtggtaggaggatcacggcgatgancaacaacatatctaatccaacaacggctactgtgggatcatcatcttcttcgtcaatatcatcaagatcatcaatgtatgttaaggttaagatggatggtgtggcaatagcaagaaaagtggatatcaagctttttaactcttacgagtccctcactaactccttgatcactatgtttaccgaatgtaagtactaattacgtttatcaaaatctagagtaagaaacctataaacaattgaaaatagaacgtaacttcttactactattgaatctaattttgggttatcagatgaagattgcgacagagaagatacaaattatacattcaccttccaagggaaagagggtgactggctacttcgaggggatgttacatggaagtaagtttacttctctatatttcaagaaaaatgacttattgagtaatgactactatactctctttcttatatattgatacttaacttgttgttttggttttgtaggatctttgcggaatctgttcatcggatatcaataa

SEQ ID NO: 192349 - DNA, 375 bp, Arabidopsis thaliana landsberg
tcaaaatacttttaacctataaagaagttgattgtaatgatgcagaattgcttggggcgatggtaaaggtttggagtttgagtaataggactggcaacattgaagacgttaatggttacaccctcccgttcaagatcatggatcgctagtgagtgatttatatttatattgtttatacataatggtctgcatagttttgtataaaaatatttgttcatattttattgcaacagcaaagtggtattgtcgtgtgaggctttcaggcagaccgctatagactttgaaaaaaactttcgcatgtatggaaggcccaatataattgttgcagtagggtggtggagggttctaaggtcaattggagggcgaacggagtga

SEQ ID NO: 192350 - DNA, 495 bp, Arabidopsis thaliana landsberg
atggccacgcgcgcgacggtgatgggctacacgcacaacgacacctatcccgcgattcccggctacaagacgttcgtgaaccacttccacctccagttcgccgaccgtctccgcgagtcggggtcgctggataacgaaacgcctgacctcgccgcgatgcgcgcgctcggcatcaatatcatcggcctgagcgatttccacgccgacaagctgcacctgaatgactccggtccgggcggccgtttcctcgaccagaaggactacttcgaggccacccggctcgcgtcggacaaggacttcctgatcacgccgtgggaggagccgagcatcgcgttcggcggccactacaacatcatgtacccgcgcccgctcttctattccaagacgcggacgaaggaccataagttcatcgagcaggacccgacttacggcaaggtctaccctcccaccaccgcgcaggaggtgcaggagatgccaacccgagaacacctactg

SEQ ID NO: 192351 - DNA, 359 bp, Arabidopsis thaliana landsberg
gggttacgtggggttgtgcctatgcaaaagaccaaaactgctatgctacaaagcgggtgcagatgatccaagacagtcctccagtttacagaaccacttatttgggacaacatacatgtaaagcctttggggtgcatgataatacgtatggctctgaaatgataaacttcgaccaagttgtatctgaatcggttatgcgtcaacttgcaacaattggtgaacaagctgttctcatggaggacgaagctaaccatatcatgaaccaagaatatgatattaatgattatttggtggatgatgaagtcttttgggggaatgaatttcctctattttcatcggaagacctgatgttgttttga

SEQ ID NO: 192352 - DNA, 324 bp, Arabidopsis thaliana landsberg
atgagttcaagcgggtctcaaggaaaagaaactccccccaaccaaaaggttacgaaaaagtcgggtaaaaagttattttaaaatatgggtttcttgaagaaccagcttctacaaaaccactgatttattacacttctttttggggggttggatcttatttagataaaagtttccgacccaatctaccagatgtcactagagaactcaacgcgtgagaaccttcagacatgttctacacttcatggagatgcctttaattctgccattagtaggatgcacccatcggcgcttgcacaagtgaagcaagccttaaagctgccgtga

SEQ ID NO: 192353 - DNA, 2971 bp, Arabidopsis thaliana landsberg
atggcgccccacgagctctgtgacgacggcggcccccagctctcttacggaagcagggcgacgtcagcaaggactcgaccgctccaacagctgtccctccgccaggctccgtcgcacctccgacagccacgacatcacgccagcaaggtgccaagacctctccggctgccacattggcatgtacctagggcgctagctctctctccgctagacacgtagcactctgctacaccccccattgtacacctggatcctctccttacgactataaaagggaggaccagggccttcttaaagaaggttggccgcgcgggaccgaggacgggacaggcgctctcttggggccgctcgcttccctcacccgcgtggacgcttgtaacccccctactgcaagcgcacccgacctgggcgcgggacgaacacgaaggccgcgggacttccacctctctcacgcccgtctccggccacctcgcctctccccccttcgcgctcgcccacgcgctcgacccatctgggctggggcacgcagcacactcactcgtcggcttagggaccccccggtctcgaaacgccgacagttggcgcgccaggtaggggcacgctgcgtgttgacgagcagtttcccgtcaagttccagatgggcagtctccaacaacctctccaacccgggacggtgctccgtttcggggctctcgagttcatgtccttcgacggcagctacgacatgatacttcttccgccaccgtgcgaccacgacaatggcggccgacaacccgcccgccggcgcgaactcgacgacgtcttccccgcgtggtggaagagcaacattcgggctcgctccgttctctcccccgccaacggaggaggaggcggggccgtcaaggcaggcgggaggccgcgcttcgtcggccgtcgagtgaatcgacgcccccgacgccccgacggaaggcacgccggacgtcgacctcgcgttcaagacggaggcaagcgccgtccccccgcggcacgctgaccccgagcaagaagacgacgccggcgcgctcgcggaaagcctgcaggacgtcgccctcgaaccagagatgacggtgcaaccagtccccgatgtgactacgtcgctcctcgtcgaccaaaaggtaccgactaactcccatcttgcgtcatttcgactcggcctcaacccgccaaacgacctcgttttggcggacgctctcattgaggcgagtgcaaccccactggggtttcgtatgcggtccccttgggaccggctgacggacgtctcgacctacgggccctctgggtccgaggaagatgacgatcccagcatctgttgggatttctccggacttggcaaccccagtgtcatgcgggacttcatgaccgcatgtgactactgcctatccgactgttccgacggaagccacagccttggcgacgagagctcaggcccaagccgcgaatgtttccacatcgagctagggatccctccaaaggcaaccatctcggcatgccggaggacggtgatcttcctaggccggtgcctcgcgccgacatcccacgggagctagctgtggtaccgctccggcgggggttacgacccacaactcgagcaagtccgcgaggcgcaggccaggctcaacgagggaacaggagcgcttgagccggaccgtcgggacgtcgggcaggtatgggcatgccaacccctggccggagaaatacgtcacctgccccaaggtctccagcaccacgtcgccaatgatgccagggtcaggccgccgcccgcatccagcggggttggtcagaacctggcagccgcagcgatgctcctccgcgcgatgccggagccatcaaccaccgagggtcggcgaatccagggagagctcaagaatctcctggaaggcgctgcgatccgacgggccgagagctctgcctcccaaaggcagggatacccctcggaacctcatgccgcgacttcccgattcatacgggaagcctcggtctacaccgggcgcacgcgcaacaccgcgctgcgccccgggccacctcggcaacgagcaccatcaccgcgaccgtcgggcccacctcgacgaaagggtgcgccgaggctaccaccccaggcgtgggggacgctacgacagcggggaggatcggagtccctcgcccgaaccacccggtccgcaggccttcagccgggccatacgacgggcgccgttctcgacccggttccgacccccgactactatcacaaagtactcgggggagatgagaccggaactgtggctcgcgaactaccgtctggcctgccaactgggtggaatggacgatgacaaccccgaccgcgtgccgagcccggggaaatacccgctcgtggtcgaccccgtcatcggcaacgtcaggctcaccaaggtcctcatggacggaggcagcaacctcaacatcatctacgctgagaccctcgggctcctgcgtgtcgatctatccttggtccgggcaggactgcgcctttccacggcatcatccccgggaaacgcgtccagcccctcggacaactcgatctacctgtctgcttcgggactccctccaacttccgaaggaaaccctcacgttcgaggtggtcgggttccgaggtacctaccacacggtgttggggaggccatgctacaccaagttcatggccgtccccaactacacctatctcaagctcaagatgccgggccccgacggggtcatcaccgtcggccccacgtaccgacacgcgtacgaatgcgacgtggagtgcgtggagtacgccgaggccctcgccgaatccgaggccctcatcgccgacccggagagcttctctaaggaggcgccagacgtgaagcaccatgccggcaacttcgagccagcggagacggttaaatccgtccctctcgaccccagcaacgacgcctccaagcagatccggatcggctccgagctcgatcccaaatag

SEQ ID NO: 192354 - DNA, 2823 bp, Arabidopsis thaliana landsberg
atgggcgacccagttacgataactgtgaagatgaacgaccacgacttagtagaggttccaaatgaatccagtttcttaaccaaattataatcgactttcttcccactaggaacaccacttaggcttgccacaccacttaggcttgccaaccctcgtgatattctagtgttgagcgacccggactaggtcttatatcattaaccacccgactgcttttaagaaaacactttatacatagtatatagcttatgctttgcaaagagttacccaaaaatatatctttgtatcggatccttgttaaaatttacataataacaagtaattttgtagaagcaacgcaaaatatcctatttccggcatttcctagtgttcgtcttcccgctatggtcatcccactatggttacctgtaagacaataagaatcatgagtaatctagcagtacttagtgagctcggtctatgcacaaatatatctctagggtttaatcaacttaataagtaaacttagccatcagagatcacaaagcacgtaataaacgttttatcatatacttataataataccagaatatgcagccaaactagacacatgaatgaaccttgggcccagcatactaccaaccttaccaaaaaggtgcaccacaacatcaacacaaactcctgcatacgtgcatatgtgttctccacacgtatgctaccacacacacgtacgtgcacacccacaccacacgtacgtacacaattgtgaacacccgagctatagccacaaaggcttataaccagaacatcactttaatgcatcgtcatgcattactcggcatacgctccgagtcttgtgccatcatgtaagtgaccactcaggatcaagacttactatcacaattacaacacagaaggggagacagaagcttactctaaacatgatggtatcgggtaaaccttgaataccacttagacacaataacctcatgcagaactaaatataagtagtttaccacaccctaaacaagtatagacaatcaagtaccaaatcacgtattaatatatgtacataatataacaaggatctaatcacaacctcatagcatatatcatataagtataacaatataacaaggcaagtaagccctcgaatcatatctcaattcatcaagtaaacttagttaaatctgaattcacttagcctagtcaccagtccattccattccttagtgatattactatcaagttcatcaaatgcccatattgactttgagattcaagttctaacttaagccgaattccgattagttaagtctaagtgagtaagcatgcatatgatctaaagactagctctagaaaacatgcaaacaaacacacaattcgaccaaaactcacagattcgatagttcagaaagttttctaggtctcgagcgaaactcctcgatcacggtcgacaattccttactcacggtcaagttttctcgaccaccagcgatgattctctagtcacggacaatgtttcctcgaccatgtgcaaggttttatcgattcgggcaagtttttcttagtttcggtcgagtttttaatcggacagccttttagtctctctctcttgccttcaaaaatgaaactgggcggagagagctctatttataatccgcccaaggttggccatgcattaccgcccgctgccacaagtccggacagctgccgcgcccacaggcgacaggtgtctcgaacgacagcgtggtgacaggtggcaacgagtgtcactccaccacccatcaacttcggctccaagactcagctgacttcgtctccaagactcagctgacttcggctccaaggttggtaacttgagccgcaaggcaccgcgagtgaggtgtcctactcatgtcggttccgcggccggtggggcaaacttcaccgtggcacgcccttcttttcccatctttgcccattcgtacccattcttgccctttgatgttttggcaccgtttggacacacgcggtcaattggctttgcattcgggcaaaagtttctcatttggtcctttggccgtgcccgatgcccttatgggggtcactacataggccctagccatgaaatttataaatgtttggtaacatgttgtgtcgtaatgactgataatgacttaatcctagtcggcacaacacttaaatatcgcgagggttggcaagcataaacgatgtttaagtgggagagtggtcgtctatacactggccaagggttgggaattggttcccgaacctcggttggatattgatgatcaatctcaatgtggcattttcgaggcgcctctgacttgtccggtcatagagcgtctcgggggcgttacaatttgtggtatcagagcatggttaatgatgctagcaggactcatgttttttcaaatgttttatcgagtaaatgagtcgcaaaagacatttaggataatccggtctgttcaccattattaggtagatgggttaagtttaccttgactgaatggatgcagatgtctggtcaaagaatggaaaggagtgagtcgatgaatttctcaccagtttatcaaaactggagtcagcatttcggtccggaagactgggtaccgtacgctggaggggaaggagatgagggatactattaccccaatatgtatggagcgcttgattgggatgttcccggaactacaccggaatactccttaccaaggtctgtgcactatagcacatctgaagggtcacattcagggacgagaccacatgttcctgtgaatcaacccactacagacccaaatccgtcgctgccaagagaaataaatgaaggaaatggggaag

SEQ ID NO: 192355 - DNA, 155 bp, Arabidopsis thaliana landsberg
atgaactcatgctgaaaaatagaagtattaacgacgctaatggtcaagaaatgactataatcaatattaaggaaatgaagatcacactaaccctttgtcgacaatcacgacagtacgaatttcgcaattggcaaacctgtaaaataacatattag

SEQ ID NO: 192356 - DNA, 100 bp, Arabidopsis thaliana landsberg
aaaagtgtgcggctcatcaaatcaaacggataaagagtactttgaatggtccggctggtgtttagttttgcggataatcagctcggtgctgcatctgacg

SEQ ID NO: 192357 - DNA, 44 bp, Arabidopsis thaliana landsberg
atggacgtggaaatgacaggacacctagtgcaagcggcgttaag

SEQ ID NO: 192358 - DNA, 81 bp, Arabidopsis thaliana landsberg
cgggaagaggaaaacaactactccaacaagaagcctaaagtgttggtcttgcagtttgtgaactaccaatccgttatctag

SEQ ID NO: 192359 - DNA, 267 bp, Arabidopsis thaliana landsberg
caagacgaatcaagttctattccattatcgactgcaaaatcagcaactaaagctgcctctgaaatagaagaagaaccatcaataacacggcgaatcacttcccgagcagagtctaagagacctctccgaccaagtttgactatcaacgacaaacatcgagaccggtggtcaccagaagcggcggagaagacggcggcggaagtggagggaaatagttccgaagaaagagcacaagttgtagcttttctggatttgaagaagcgataa

SEQ ID NO: 192360 - DNA, 901 bp, Arabidopsis thaliana landsberg
atggctcctcctaccaagagaacaagagtagaaatggcagaatcatcaaataagaggatgaaacctagtgaaacgttgcctgaagatttgttggaacacatcatgtctacgtatcttcccgtccaatctctgttaacaactcgtgtgttgtccaaaagatttcgcgagaccaaggtacgttctcttgacctcgatttcagtggaatatattctagaagacgtcgtaaagtagaagttgttggcatcatcgaaaaagtgttcaatcaacataaaggatcagagattcaccgattcgttctacttctcaatcatattggggtagaagataaaatcatctcatggaccaatacatgttttggcaaaaacatcaaggagcttgtcttagatttttcaaaatctagaaaagttatggccatacccattgatttctcggctgtggagagtctacaagttttgaagctgcgatggtgtaaatttgaaatacctgatagttccccaaaaggtctaaagctcttgaagacactctcgcttatgcgtacccaagtgatggtgaagactatcgatgcaatcttcaacaactgcatccacctagagtcgcttgaactaatcgaatgccgtatggatgggatattaagcatacgtgctcagaatcataagaagttcaagtcgcttgttgtgtcttttatgccggatctccgacacatccggttggacgcacccactttagaaaactacaagtatgatggatatgtcatttgtgttaacattctgataacaaatgcacttaaagaggcaaatctctactacactcggattcggcgtttataccaccaaaaatctgatttggtggatacactgcgattctatacaagacttactgtcctcgcaacgacatctattt

SEQ ID NO: 192361 - DNA, 222 bp, Arabidopsis thaliana landsberg
atgactgaatccctgcctgcgaacgtaagtccattggggcctcaactgacaaagttttttcagaaggaaaaggagcccgaaaaaacgaagaaaacgactaaagcaaagagacaaagaatcatcgctgtgacagaggtcattgacaagacaccaccgagagcttcagctcagaagataccggcggctgagggaataacaaatattgaaatcacaccttcggag

SEQ ID NO: 192362 - DNA, 571 bp, Arabidopsis thaliana landsberg
atgttttctatcatcttctcgaaccctgtcaagccttttaactccgtaattatccatcaaattcgattcttttcccgtgacccattccccaacaaagtccagcactacctttacagagcaaacctcatcgactctatccgtcttagcctccgctccccaacaacctcagacaggacactagcttctcttctaaaccaccgtcttctcgattcctttgtcgtcaaaaacgctttacgctcatctccttctgtgtcttctgcttggtctatcttcaaaactcttagtcacaaaagccctcgcttttcttttgaaactgagacacttcacgcctttgccactgttcttgcaaagtttcagcgatcttcagagcttaactctctaattggagttgtcaatgcttggaaatttaggaatgttcatttcagctttatgaatctcttgaacttgtatgcaactgctggtgatttcgactcggttcttaagacgtgggacgagtatagatgctcaggagaggagaagaaaggctgcactgagtcttataacattgtgatgcaagtttacatgactttag

SEQ ID NO: 192363 - DNA, 96 bp, Arabidopsis thaliana landsberg
atgtatggggaagaggacaaaaacctaatgcttaagtctctagaggctcgtttagctataatgaacatcaaaacggtaacagaaagtgaacgagaa

SEQ ID NO: 192364 - DNA, 342 bp, Arabidopsis thaliana landsberg
atcgcgatttgtttccgcgcttcgaggaatcgacgatctagcgttggcgaccaagtgatctggtttttcgagttctgcaaagttgaagaccctgagcatctgtttggtgaaggtaagtgtcccttgacccatctatgtcctactcattttataattcactccccgcattcacacaatttataccaggtcttctcccagtaggtcgtcttcttccattgatgttggtatatcgttggaggcttcctggtgtggtgtgggcgatccagactccgagggcggacggtctgcgcctggtgcagattgtccgaccttgctggccaagctatctgccgtacctgcagg

SEQ ID NO: 192365 - DNA, 404 bp, Arabidopsis thaliana landsberg
gtgaccggtgacgaccggcgccgctacctggactggttcgccaccatcccgctgtggctggacctgggcgggctgcgtgttgtccatgcctgctggcacgagaagtccatggcggtggtgcaagagcactgcggcaccgacgcacccttcaccgacccggatcatctggtgtccgccaccgacaaaggccatccgctgtatgacgcgatcgagaccctgcttaagggccccgaggtcagcctggtcgagcacggccagccgaagtacaacgacaaagacggcatcgcccgtggccgcgcccggatgcggtggtggaacagcgacgccacgaccctgcgcgacatcgccgagatgagcagccgcttcacaaccgaggccgacgagccctacccgcgcctgccaga

SEQ ID NO: 192366 - DNA, 131 bp, Arabidopsis thaliana landsberg
aagcagccttgattcatgaagctttactccgaataaacatttatgggacgggtcctcggaaggttcttgatcggacaggatacagcatggatttctcgctcatgggcaggagttctcgatcacggacatga

SEQ ID NO: 192367 - DNA, 221 bp, Arabidopsis thaliana landsberg
caacgttcaatcagttagctctcctaggtaaaccgattgaccatgaagaagagatcgagttcctcctagcagacctacatgaagactacaaaaccatggtggatcaagttgaaggtcgtgaaaatacaccattggttattgaagttcatgaaaagcttctcaataaagaagcaaaattgatggcactctccctttcggcatcaagcgttgtacctgcctga

SEQ ID NO: 192368 - DNA, 94 bp, Arabidopsis thaliana landsberg
gtcgcccgcgactaggctgatccatgttgatgatgatcaacctgatgaacaacataagaatcatttacgccaattttgtttggtccgcgactag

SEQ ID NO: 192369 - DNA, 135 bp, Arabidopsis thaliana landsberg
atgcaccgtttttaccgtctcctcttcatgttgctgcctttctgcctgggcgcctgcagcagcaccttgaatgtaaaggaccccgtgaaggcgtacaagagcaccagggtctttcagacgaaggatggcttgttc

SEQ ID NO: 192370 - DNA, 282 bp, Arabidopsis thaliana landsberg
  unsure (1)..(282): unsure at all n locations
atggcgttacagctaatcgataatagtgtaggtatgcgctgcaacagtgctcattcagtcgggtgtcggcatcactcaggcccacgatcgccacatgacgcgtgcgcgcgtcatattcgggcggcaattcccacgggatgacgcacgtgacnnnnnnnnnnnnnnnnnnncggtctcaaatcgcagtccgacaacagtaccgagacctcaaggtcctacacgtcgaactgtggcgtcgactcgtatggatggaagtggaagcccatgtcgactcctcgcgag

SEQ ID NO: 192371 - DNA, 308 bp, Arabidopsis thaliana landsberg
atgacagtcgaagagctcgtccagcggctcggtctacaggcacaccccgagggcggctggtaccgcgaggtctatcgagacgcggccgtgtcgacgatccactacgtgatgcccgccggcagcctcgcgccggtgcattgtgtgaacgaccgcgtcgagctgtggcacttctacggcggcaccgcggtcgagctgcacacgatcgttggcgagcgacatcagatggtccggctcggccccgacgcgccgatcgtcgtcgtccctgccggcgcgtggcaagctacccgcgcgggtgacgggttcgcttg

SEQ ID NO: 192372 - DNA, 872 bp, Arabidopsis thaliana landsberg
atgcattcgggcaaaattttctcattcggtcctttggccgtgcccgatgcccttatgcgggtcactacaggtactaccgaagttattttcggactgtcacaagaaatgaatcaaaaaagaagcaagaaaccaaagccaagatggagtttctaagagtataggaacttactcaacacatgtacctgcttgagaactattttgacatccacaagaacaagttgggcatggtactatagtttcattgtagaaggatgagagtgagatccacaacaagacggagtttttcgtgctagaaactgcgaatatgtgcaagtaatgttccatgtaactgcaataagaaaacatcaagagaagtgggattacaaacaagaaaatataacttatagatgctaatacaaaagctaaacttacccaaagactaagtctttcttcgtttatcaacagaaatgaatttactctgctacttggtcttctatacgcacatggagtaattcagctcgccattgtccagtctctcccaaactgtgtgacaatccagctctatgtgctttgttctttcatggaacacaggatttgtggctatgtaaatagcagctgtgctatctgaatataacacaggaaccaagtagctagcttttaaagacatgagcaaagtgtgaagccaaaccagttcacacgtagccaatgccaatgcacggtactcagcctctacaaaagatctggaaaccacatgttgtttcttggaacgccaagatatcaacgaatcaccaacaaaaatgctgaaaccagttgtagatctcctactgtttggacatgaagcccaatctgaatctgcaaagcctttaagagtgaggtctgcagatgcagaatag

SEQ ID NO: 192373 - DNA, 1485 bp, Arabidopsis thaliana landsberg
atggtaaagccaagaagacatttcgtcttcctggatgaagagattctgatgaggcagaggaggcggaagcggagtattttcttctcgtccgccacttccgctgccacggagaatgggaagaggatcggaggagggtatctgtgtctggccaatcttacataagagctccactatatcatcttcacccctagtttcaaaaaaaagtttaaaaccctaataataaaagattcatggaattacagagtgagaaaaaaactttcaagtaagaagataaaagaaacttacatgatggaggggaatttctaatatgatcaagaaggaggaagaaatagaacaaaaagaagaagaatctgtgatgatataatcatcataggtttccaagttgaagtcttgaacgaaaatgattcatattttgtgacaaaagaaacaaagtttctgagagaaccctcaaaacacaaatactctctatatatatacatattatatatttgtgaattgtaccttttatcaggagaaaaaggcagatatttgtgaaagaaagaaaaaagaaacataatgtcgtttagccagaaacctccaaaggaaccacccagaggccagaaaaaaacatgcagattcattgatttgcgagttccttgttttttctttctccattgtctgattctctctgatttttttgctagataagctctctctctgtctctctttgagcgtctttgtgcgtgctatgacttttggtatattccgaatgacgtcaacagcccactttggtctcactcatggctccacttgtacgtgtaaacaaaaatcaccgggaaatataatagtacgagttttgtatcaaccttaggaaacaaacagacttcttcttacgccatcctctttacaaatatcattaaatatatatttagtcattttggctgagacataggagatgttagtcagtcaaaaacggagactaacaggtgtgcttggttatattttgctattttgcagataatttattttatgattttttctccgaagaaatagattttcattttctgaaaaacatttgcatgttagcaccttcaaaattgtgcttttcttagagaacagatccttttttttttaactcttcaacatcaacttgcaataacacaatggagatccatctgtcagaatcttgaccattaatgtatccggcaagaaaagcctctggctgttcctgattcctactaacttgttggttggttgtcctgatccccaagttacttgctagtacttgcgtggctgaaactaggctgtgatgttggttgaccctacaagaacatttagaaaaaaggttattgatgaccatcacccattcgtaggaagagaggcagaataacggcaatagatactgagaaagaattacctgcaatggaggacgaggttgttggatccggtggtgaccaacaaactggctatagggattcatctgaggttggttcgacaccagattag

SEQ ID NO: 192374 - DNA, 397 bp, Arabidopsis thaliana landsberg
atgagtagagtctcttttcaaaaattcaatgataaacagacgaaagctggtttgcaagtgctggccaatccacgcaatgcggccagcgggagcctgcgcttaaaagatccggctgctgtcaggcataggggactagacgcctttttatatcatatcagcagtgtcgtactgatagaaggtaaaaagcctacacagctgctggatacccatagtggtaatttggcattgctttggaagtgtggactcagatctccaaccaaagaaagcgaaatctttgacaccatggacgccgtcatctcccatgtaggcgattttgaagccatgcgtgacagtctgccctatgaaattgatggtatggtcatcaaagttgacagcaatgcgctgcaagaagcattag

SEQ ID NO: 192375 - DNA, 133 bp, Arabidopsis thaliana landsberg
aactcccaaaatagatatgggacgccaagaacatgatatgcgtcgtggacccgtgccacggtcgctacctgacggcgtccgccatgttctgcgccaagatgagcagcagggaggtggacgagcagatgcttaa

SEQ ID NO: 192376 - DNA, 988 bp, Arabidopsis thaliana landsberg
atgaaacgtcagaagatagatcatatcccctttgatctaatggtggagattctcaccagattaccagccaaatctcttatgaagttcaaatgcgtttccaagttatggtcgtccattatccataaccaaagcttcatcgattccttctactccatttcctcaacacgaccacggtttatagtcgctttcagcaacggttcatttcccagtgataaggagaagcgtttgttcatcttctcgtcctcacacgagggacatgaatcttcttcttcagtgataaccaatctcgatacgacaataccttctctaactgtttctaataaccttgcgtcacggtgtgtttccctcaatggttttatagcctgttcactttacacaaggttcacgatatgtaaccctagcactagacaagtcattgtcttaccaatcttaccctcaggtcgtgctccagatatgagaagcacatgtatagggtatgatccggtggatgatcaattcaaagctttggctcttatttcttctcgcatacctaataaagatagtactgtagagcacttggtgttgactctaaaaggcgacaagaaaaattactcatggaggcaaatccaaggaacaaacaacattccaccttattcccctgtgactatgagagtatgcatcaacggggttgtgtattatggtgcttggactccaagacaaagtatgaatgcagtgatcgtttgttttgatgttagatccgagaagataacttttatcaaaacacctaaggatgtcgtaagatggtgcaatgattcaattttgatggaatataaagggaagttagcttccattgtaagaaaccgttattctcgtttcgatacttttgatttgtgggtgttagaagatatcgagaaacaagaatggtcaaagcaaacatgtgagattcctctctctgtgtgggattctgttgagaactttaacatgtcttttccaggtattaacaagtttg

SEQ ID NO: 192377 - DNA, 119 bp, Arabidopsis thaliana landsberg
tgaagttctatgttacaattgatttccaaaatgctaactacaaaataaaaataaaagagcttttggatcggcgtaaaagagacagcagagagataaaaaggcaaaatacgaaaaggtga

SEQ ID NO: 192378 - DNA, 333 bp, Arabidopsis thaliana landsberg
atgccaccagagcggaaggttgagtttgctatggagcttcttcctggaaccgcccccatctctaagagagcttacagaatatctggaccagagttggttgagcttaagaagcagattgatgagctgtcagagaaaggttacgtccggccaagcacttcgccttgggccgcccctgtcttgtttgtggagaagaaagatggcactaagaggatgtgcatcgattatagagctttgaatgaggtcacgatcaagaacaagtatcctttgcccagaatagaagatctgttcgaccagttgagaggagccagtgtgttctcacaagatcgatctgag

SEQ ID NO: 192379 - DNA, 169 bp, Arabidopsis thaliana landsberg
gcgcatggctgaaaaaactttcgggtatagccgtatcgccttccatcaaaaaacagttaccgattcctttcccctgcatttcgggagcgggagatggttcacaggatatctgcaccagaccatgagcaatgaaaagcaggttgcagcaggtttccccattgcgcagcag

SEQ ID NO: 192380 - DNA, 169 bp, Arabidopsis thaliana landsberg
gaagaacggcatgatacggataagttgattcccaaagcaccaaagtcaatgatgcaagccaaactgacatcattgtatggaaacagtattggtaaaccagataatcagcgcaaaacttcagtgaacaatcaagaccgtgcctctgatgaatgtgtcattgttgagagaa

SEQ ID NO: 192381 - DNA, 91 bp, Arabidopsis thaliana landsberg
gacgtgaaagattgtctcttggctgtagatcatgccattgaaatgggaattgccgacccgtctagaataaccgtgctaggtggttctcatg

SEQ ID NO: 192382 - DNA, 308 bp, Arabidopsis thaliana landsberg
gtgtgcgtggaaattaaaaggtcaggtcctttacccgtacccacccgattatatgatctacgtacacatatcattcaacaatcgtgcacgtacggctggacaagcaaacgagtgcgcatgatgagtagtgctcgcagtggtactggtacacacgtccaagtcgtccgcccggccgaaaggggtggtgcacgcagacgcaggcaggagacacgaacgagaggcctggtccggaccagcagacgcatgcgcgagggcgcgcactcgcggtcggggacactgctgccatgcgaggatgcccacaaatcatg

SEQ ID NO: 192383 - DNA, 118 bp, Arabidopsis thaliana landsberg
atgtgtgatgatagagatattgatgacaataacagattgatgcctattgatcgagaaagtggagcagatgacttaatagttgataggaaaccatgcattgatctacgttttgatgaga

SEQ ID NO: 192384 - DNA, 1019 bp, Arabidopsis thaliana landsberg
  unsure (1)..(1019): unsure at all n locations
atggatgcatttactctggagttcttgagtgagtctgaaaagggaaaccaaactaaacggagaacagacaggttttacatagttcagacaatggcatcagcgtccagcaaaattggtttgtttgctgccactgcatccaaagaatatgatattcacttgctaccgtgggcttcagtagcagcatgcatatcagacgattcatcagaggtactgtgcaatattgattgtgcctttntgctatctgcagtaatattttttcccatgtcgcaccttcgtcattgtgtgtgtttgcctatcatccagataacatgtattaacctgttaaaaattgtttagatttttgctcatgttggaactttgtgtacattcttgcattactccacatacatttatttatctgtgttatcgtaatatcctccatcttcattcttactggtaatccatatatttgcattcttttcaattatcatgggattactctgtgccgcgaaaggaagtcattcgtcactgcttttcgattggagcttgcattcactcgtgttttcatatggttttgacagaataatatcctaaagcttgggcatgctttctgctttcttcccttgcctgtacgaactggattgacagtacaagtcaacggatactttgaggtgtcatcaaatcgtcgcggaatttggtatggagnnnnnnnnnnnnnnnnnnnnnnnnnnnnnnnnnnntggaataggcttctcctggaagatgtggtagctccctcttttgcacgattgctactttgtttgagagaagtgcttgattccagagattcttacttctccttatggccaagtggatcttttgaagcaccatggagcatattagttgagcaaatttacaaaaatatctgcaatgctcctgtactgttttcggatcttgatggggggaaatgggtgtctcctgctgatgcttatcttcatgatgaggaattctcagggagcaaagatcttggtgatgccttattgcagcttgaaatgcctatc

SEQ ID NO: 192385 - DNA, 121 bp, Arabidopsis thaliana landsberg
agtgacaacaatgatcgagatgggaatgctcgacaaagcctacgatatctcacggctggctgtcttgaacgaatatcgagtcgatagagacatcgtattcatctgcaattccgatatataa

SEQ ID NO: 192386 - DNA, 270 bp, Arabidopsis thaliana landsberg
atgacgagaaaagcaatgataaacatttgttgcgtggccacaacgccgtccaagtatccacctcctcctcctcttacgttaacccctcgccagagtttggaatcggcggctatctatggagtcattgaatccgcggcggatataatcgagagatggaacactgagaccaacactttcgctaaagtaacttgtatgttctacgagaacaaacctgaagccatgatgttcatcgaacgtgtgaaggatcttcagaagacgatggacgtactc

SEQ ID NO: 192387 - DNA, 322 bp, Arabidopsis thaliana landsberg
atggactttggctacaccatgaaagctttgagaagacagaagaaggttggttagtgttttggagtcgaatatgacttgatgtcatgtgtatgtgataacactagattttaacctttttaagcccttgtttttcatgcatttagcttagtttcaagtctctttttatgcattcttattctcttttccttcttttgcacattttgcgttgcattgcatagcatacttgcatttggagtgttttgcagatgaattaggtacctttggactcaacttggaggtttgtagcacaagggatggacagactcgagttcgggggacctaa

SEQ ID NO: 192388 - DNA, 4778 bp, Arabidopsis thaliana landsberg
ggtttttgtttctcggtgtctcagtccgataatcctgagatgaagacgatcaagcccttgccggaaggagttcgtcactccatgcgttctggaattatcatgttcgacatggcgagggtcgtggaagaactcgtcttcaacagtctcgatgctggggcgaccaaggttccacatatatcagttcctccttcttcgatttcttctgggtttggaacaattctgcttatcgatatctctatattcaggtgtctatcttcgtgggtgttgtttcatgctctgtgaaagttgtggatgatggtgagtatatagcttcaaaatcattacttttacctttgtactaatcattgaatcctaatttggaaatatttcattgactttggtttcaggatcaggcgtttcaagagatgatttggttttgttgggagaaagatatggtaagttctggctcttttttgttctctcattatgattttcgatctgatgagaaactaatcatgagcaatgtgtaaaagcagctacttcaaagtttcacgacttcaccaacgtggagacagctagtgaaacttttggatttcgtggagaggccttagcttcaatatcagatatctcgttactggaggttaggacaaaagctattgggaggcctaatggttatcgaaaggttatgaaggtatgggatgtcttttgatgcgactcaacactcctacatagtttctgtggcgttggttatggttttaaacttctgaaaacgcttttcagggatccaagtgtctacatcttggaattgatgatgatagaaaagactctggcacgacgggtaatgtgtcttttgtcaccattgctttttctattatgcttaccaattgtgatagtgaagcattaagtacaattttcagacactatttgtgctatacgatagagaaatgtgttcgatttttggctaacattggcacatgcatgattaatatctgatcttgacctggttgatgcagtaactgtccgagatctattttacagtcagccagtgagacgaaaatatatgcaatccaggttcgtttcttagacacttactttttagattaagacatctgaattttaatctatcttcgccttgtctcaagtttttttgacatgcgaccatgttttttctttgcaatggtagccccaagaaagttttggaatctatcaaaaagtgtgtgttccggattgcccttgtgcactccaatgtttccttcagtgttcttgatatcgaaaggtgcgttcctactttcatttaaatatctttatgaaatccgcccttctgatcgtttccttgttacagtgatgaagagcttttccaaaccaatccttcttcttcagcattctcactactgatgagagatgcagggaccgaagctgtaaattcgctttgtaaagtaaacgttacagatggcatgctgaatgtctctgggtatgtatctggtcctggagatagtttaaaggtaggttacttgctccacttgtgggattcaatatttatctcccttttttgtcagatcgtaactttgagccttacctttctgaataattgtggtactttccttgcaggccttgcagtatatatgtatccatatttctgcatctttttatgtgtgactatacatcaactatcttctgaagtttagttaggcagtttctgtatatggttgtatggccttcacagcaacagatatcaattcaagattcattagcaaaggtcctattcataagctgctgaacaacttggctactagttttgagtgtgcggatgactggaagcctacggatgggcaacaaacaggaagacgcaatagacttcaatccaaccctggttacattctgtgcatagcatgtccacgccatctttatgaattctcgtttgaaccatcaaagacgcacgttgagttcaaggtattagatttctcttggatctaaatttaggtagattttaatttttttttatgattgcaaatatttctatctgtggcagaagtggggacctgtacttgcctttatagaaagaatcactctagccaactggaagaaagatagaatccttggtatgccacacttttctcaatctctgattgtatccctgatatttatggggttttcaatgtatttccaacgggttttttcttagaactttttgatgggggagctgatatactggcaaaaggtgatagacaagacctgattgatgacaaaattagacttcaaaacggtacacaagtttttcaaaatgttacattatataacattaattcttctatatcggaacggggcagtattttttgtttgtccctttgacattcctaggcagccttttctcaattcttcattttctggatgcagattggccagaagctatggaacctgcaaaaaagaagctgaagagaagtaatgatcatgcaccttgtagttctctcttgtttccgtctgctgactttaaacaagatggtgattatttttctccacgaaaggatgtatggtctccagaatgtgaagtcgaactgaaaattcagaatcccaaagagcaaggtactgtagctggatttgaaagccggactgattctcttctacagtcacgtgacatagaaatgcaaacgaatgaagacttcccacaagttactgacctccttgaaacaagcttggttgctgactctaagtgccgtaaacagtttctaacaagatgtcagattaccacacctgtcaatatcaaccatgattttatgaaagattcagacgtgttaaattttcagtttcaaggattgaaagatgagttggatgtcagcaattgcattggaaagcatctcttgcgtggttgctcttcaagagtaagcctaacctttcatgagcctaaactatctcatgttgaagggtatgaatccgtcgtgcctatgatacctaatgaaaaacaaagtaatccgcgggtcctagagaccagagaaggtggtccgtactgtgatgtttattctgataagactcctgattgttccctagggagttcatggcaggatactgattggtttactccacagtgttcctcagatagggaatgtgttggaatgggagaagattttaacattacccccatagatactgcggaatttgattcttatgatgaaaaagttggtagtaaaaagtatctttcttctgtcaatgtggggagctctgttactggtagtttctgtttaagttctgagtggtctccaatgtactccacaccttctgcgaccaagtgggagtctgagtaccagaaaggttgtcgaattcttgaacagagtttgagactgggaaggatgcctgaccctgaattttgtttcagtgcagctaacaacatcaaatttgaccacgaggtcatacctgaaatggattgctgtgaaaccggtacagactctttcacagctattcagaactgcactcagttagctgataaaatttgcaagtcttcgtgggggcatgcagatgatgtgcgtattgaccaatatagtatcaggaaggaaaagttcagttatatggatggcacacagaacaatgctggtaaacaaaggtcaaaaagaagtcgatctgctcctccattttatcgagagaagaagagatttatcagcttaagttgtaaatcagacacaaaaccaaagaactctgatccatcaggttcatacttctggtctttttttcagatgtggttattttgttgctactgttgtttaagttttggggatgtggtataaaagatagtaatgaggtctaactttctgcagaacctgatgatctggagtgtttgacacaaccttgtaatgcatctcaaatgcatcttaagtgcagcatccttgatgatgtgtcgtatgaccacatacaagaaacagaaaaaagattgagttctgcctcagacttgaaagcatctgctggttgcaggactgtgcactcagagacccaagatgaggatgtgcacgaaggtaatatttatcttattttagctgtattctctttatctgaataatcatctccaagacactgctacaaaagaggagacattatattttgtcatatctcctagttcgctgtagactatagttgttagtcaaaacgtgctcctttccaagtttgttaataggaagtctttccttttttcttctcccctcttccatctggagtatttaagtatgttatctatctcgcagacttcagctcagaggaatttctggatccaattaaatccacaacaaaatggcgccataactgtgcggtctctcaggttaggcaaattgaaatggtttgtttgtctaacagtatgactttccgtttccatctatggaagacaactgagcatccatcatatttttcatcgttgtgcaggttcccaaggaatcacacgagcttcatggtcaagatggtgtatttgatatatcttcgggacttctgcacttacgatccgatgaatccttggttcctgaatctatcaacagacactcccttgaagatgccaaggttctacaacaggttgataaaaaatatatcccaatcgttgcttgtggaacagttgccatcgttgatcaggttcgtctttcgtctcatttatctaagattctggaaactttatatctgtagatggttgatgaatatattcaaactaagacaccataagttgtggaaactatttctcttaataaatgtcttgctacaagttgatctgagggaacaatttcttacagcatgctgccgatgaaagaattcgtttggaagagctgcgtacaaag

SEQ ID NO: 192389 - DNA, 426 bp, Arabidopsis thaliana landsberg
atgcatacgttgctgggctgtgtggccctgctgctgctggcttggctgaccagctgggtgacgcggcgcgcaatgattgccgtgacgggcgtgatcagtcggcgcacgcagtggcggtgggacgatgccatggtcaagcgcggcgtgttcctgcgcctggcacaagtcatcccgatgctggtcatcaagttcggcttgcaggcggtgccgggcgtgccggccagggccgaagccgtggtgtcggccatcacgctggcgctgatcgtcgtcttcgtgctgctggccatcaatgcggcgttgtcggctgcggacgatctgtaccgcgccacgccgcacggcaaggagcattcgatcaagggcttcgtgcagcaaatgaaaataatcgcgtggatgtttggctcgatcctcatcgtggccgccgtgttc

SEQ ID NO: 192390 - DNA, 722 bp, Arabidopsis thaliana landsberg
atggtactacggcgaaacgtagaggtcaggataatcctcttgtctgaaactgagttactcaactccaagcagaccagacaaatagcagtgacaactagttcatatactgaaagtgggaatgagattccaatgaaaaggattgaagcaatcatccaagaacagagattagaaactgagtggttacagaagactcctggttcacaaggccggttaaaacccgaaaggaaccaaattctacctcaagaagacaccaatggagttaaagtcttgaagatttgtgaaatgggtgagtttcaggagaatcagagtggtaaaagaatggaacactgtcctgtttctccaagcttactacacaatagtaacttcacaaacaacaaagacaatctgtaagtaatcttgcttcagtgaagagaaaaccgaataagtaagatcttcacaataaacaattgttttgtttggtttgtgcagaggatatgaatcagaatcagggagaggagtttgcagtctgcttttctgttggaacacacaaaagtctccaagaagaaccaaagtgagttaaattcacaaaatcttgtttaaagttgcaatcaaccaaaaaataatttatctatttatctgacgtttttgattacttgattatagatcaaagggacttctatgcgatcacgaagaagtcgagagagacgtttctccttgttcagtgcatgtgctaggccaaggaa

SEQ ID NO: 192391 - DNA, 347 bp, Arabidopsis thaliana landsberg
gggtgtggccaccgacccctctaaggttgctgctgtcaccacttggccccaacccactgattgcaaacaattacgcggcttcctgggacttgctggttactaccgtaagtttgtacggcattctggagtcatcgccaaaacacttaccagccttctcaagaagaacacgccgtttgtctggacgggagaacacgagcaatcctttcaggcactaaaagctgctttatccacggcaccggttctcgctctcccagatttttccaaacagtttgctatcgagactgatgcttctggcaagggcataggtgcagttcttacacaggaaggacatcctctggcgttcgtca

SEQ ID NO: 192392 - DNA, 218 bp, Arabidopsis thaliana landsberg
gtcagagttccgagtttgggtttgacacaaaccgatcagttaaatggacttgtgacatctcatcgggagcaagaaagagtagtttcgtcatctttgatcttaatagaggcaaatcaagatgcagatccgatggtttttgtctatggcaaatcaatcctgatggtctttacctatatgtcgcttctattcagaaataccaaaagcaattcaattggtga

SEQ ID NO: 192393 - DNA, 337 bp, Arabidopsis thaliana landsberg
ctaaatcgagatacttgggcgaatgatgctgtttctcagactatcaaagccaacttcatcttctggcaggtttgatatagaacttcccccttaaacttccgcttgcttaatctgaaattctctttacagaattggttaaaatcctgccttttctgttactaggtctatgatgataccacggaaggaagaaaggtttgcacatactacaagctcgaatctattcccgtggtgcttgtaattgatccaaccactggtcaaagaatgagaatgtggaccggaatggttgaccctgagaatttgctagaggatttagtgccgttcatggatggtggtcctc

SEQ ID NO: 192394 - DNA, 204 bp, Arabidopsis thaliana landsberg
atgatgacgaggggtgttgataatgaaaaagagcatgtgatctcagacatagatggaagtcatagggaacgatctcaagttcccgacactcaagaaaatgaagaggtgtatcgtgtaaacattgaagatgaatcacgtctttcaaccgaattcacccgggatgcgacccgaattccttctttcataactcaacaacgggggaat

SEQ ID NO: 192395 - DNA, 308 bp, Arabidopsis thaliana landsberg
gttcatctccagagaaagacaaggttagtttagttgctgcatttagtcctggaatagtctccctaggagttcaagtaggaaaattcattgcccccatagctaagctgtgtggcggaggaggtggtggaaagaaagcccgaaaatctctcaagtgccttagagaaagctcgggaagatctcgtggcaactctatccgaaaagctagggtgaagcacaacttcaaaagtgaactgcatgtacagagagaaggaagagcacaaagcttgattctagacaagtgtattgcatgtatagatgatggacattaa

SEQ ID NO: 192396 - DNA, 215 bp, Arabidopsis thaliana landsberg
agtctgagcgggtggtgcaagatgcgcttgatcaggtgatggtgaaccggaccacggttgtggtggctcaccggctcactaccatcaaggacgctgatatgatcgcggttgtgaagaacggtgtgatcgcggagagtggaagacatgaaacgttaatggagatttcaggtggtgcatatgcatcgcttgtagcttttaatatgagtgcaaactga

SEQ ID NO: 192397 - DNA, 253 bp, Arabidopsis thaliana landsberg
atggccacatgtattgacctcacctatggaaaggctgtcagcacagccttatctgtggaagcaaaatatgcaagttctgggaagaataagggattcagtggtgagaggcctaatcagggccaggcgaagaggcaacggttcgtcatccggccttctagccaaaactgtactttttctcgaccaccaacattccctttcaaacagcccattattatccgccccaacaatacctccactcccccaaatcagccgg

SEQ ID NO: 192398 - DNA, 322 bp, Arabidopsis thaliana landsberg
atgtcaaatatagcacaacagctcgggctactaaccaatacagtctactttcttcaaagcaaataccacagatgccaacgccggatgttacgcctcgaaactcaaaagcagggtgccatacctaccaaacgggtcttgaaaggtgtgtgccggttctatttgcacgcacaccaggaactgtcggggctcaacccgttaagggtggaggattcgaacaactaatgggaggggattcttctcttaaacatgactcggatgagcagctgagatctccacgctaccaaattacattactgccggagacatacgacccgagagcaag

SEQ ID NO: 192399 - DNA, 414 bp, Arabidopsis thaliana landsberg
atgaccgacgatgttgcgcagcatgtgctgcggcataattacgatcagaccctcgccctgtccttgcaggagatgcgcgcaggcgaggataatgaggcgattcaggcctttatgaccgggctggagaaacgcggacggctcgatcgcaaggttgagggcctgccgtccaacgccctgatggcgacgcggcgcgcgcaggggctgggtctttaccggcctgagctggcggtggcgaccgcctacgccaagctgaccctgttcgacgacatgatcgcctcgaccgcgcccgacgacccggccttcggcgacgtgctgaccaactatttcccggcggccctgcatggctacgggcgcgcgatccgcgaacaccggctgcaccgcgagatcatcgccaccgtgatggccaataagatc

SEQ ID NO: 192400 - DNA, 1662 bp, Arabidopsis thaliana landsberg
aaggatcgtttaaggttcctcctcgacgaactatctgccattgcacaagcgttagacgagaacaacgacgatttgtttatttccaggcggtgagaatcgccgtcgaggggaaataagacgaaagcatgaattctcgccgacgtttacaaattgggccgtattaatgggctgaaaaatgggccttaaaaagcgcgcttaacgtttggaattactatgtctgtttcctttaatttaccggtttacttttttaccatggttagactaaaacgccgccgttttggcacaggccctaatttatgggttctctccttaattggtgatcatcctccttctcaagctgttggccgtcattgaacttggagtcacaggtcagcttctgattcttaattctgtgaatttttcgtttcaaaatattaaccgaatacttgaataatcgtaactaaatattcttctggggttctttttatttagtcgaagtgtttgaattcaattgcaatggagcagaaaccaccagtacggaaggtttgtgtttgctatcatcgttaacttctcatgttagataaaatatttggctctgctaaattttcgattttgcgttcttctgcagatgaagttagccaaaaaagctccacccaaacgtgtgccaaaacctgaagttaaaccgtaagcaacactaatgactgatctgattaacataaacagatgtttttcttctgaaacttttgaattatgaatgcagtgaagtggttgaggataatagtaacagtgcacaagcatcggaattcgtacgcagagttaatgtaagctttttttttttaatcgttgagtgaaattgtctttgctcttgtgtcttcttacttactcagttctctttaattttgatttttgtttgccttaggaaagatcattgcgcaagccaaaagcggacaagaaaggtagtgtctttaacttgaaactcagactcgtatctttactctgtttgctgctacgttatctagttgtaaaaaaaaacatcactttgatacatcactgatttagtttttgttatgtatcatacagttcctgcttctcaagttgcttggttggggggagtggtgaattcaaccagatcaaataagtacctcaatagatcaagtaacaatttcttttctttgtttaaaacataggcaattatatattttaacaaaaaaaaacataggcaattgtattcacaacacatcacaagtttttgataattctgcgggggtgttgatacatgctggttgttgtgcagatggtgcttatggatcaacctctactcaggagatagagtataaagaaccatgggtcggtataacagtaccctgtccctaaagttatatctcgaactcatatatcgataatgttgatgcataattaattcttggattgtctcacaggattactacagctattaccctatcacacttccaatgaggagaccgtatgcaggagatccaggtattcatatatttgcttgagaagaaaaataaaacaattttgtgaaagcagattcttgattaccatttgcctatgtttaagatgctgctcattattgcagaggttcttgacgtggaggagtttatgcaggctggaggacatcatgaagattcccctaacccagccgctaatctcggtctaatg

SEQ ID NO: 192401 - DNA, 424 bp, Arabidopsis thaliana landsberg
atggacctcggttacatgggcaacaaaaccggattaaagatcgaaaacctagttcacaatcacatcaagagctcggcggtgatcgtgacggagccagatttcaacgctaagatctgtcacttcggaactgcgcagctttgcggcgaaacagatgaaatgtcactggagagagacgaatcgagaaattcaaggcgatctgatagcagagcgatcagattcgaaggagttagaggttacatgtcgccggaatttcaaaatttgggaatcgctactcagaaatcggatgtttacgctttcggagttatgatgctggagcttctctcaggcgaggagccgttgaagtacaggtatgataaagccacaggagatttcgagcggacgtcggtgattgaaacggcgagagcggcgatcgaagatggagatg

SEQ ID NO: 192402 - DNA, 96 bp, Arabidopsis thaliana landsberg
atgcagttctccatgtttggatccatcttaactatcggtgcaatgcttggtgctgctatgagtgggaaaatttcagatttctccggccgaaaaggg

SEQ ID NO: 192403 - DNA, 120 bp, Arabidopsis thaliana landsberg
aaatggagggggaccacgatggatttgagagaaataaccgataagaggggagagaatatgaattttacacgggacgcggcaattggatcaagaaggttatgttcaggagatggtggataa

SEQ ID NO: 192404 - DNA, 145 bp, Arabidopsis thaliana landsberg
gaccacggatcgcttgaggacatcacgttccatcctcagttcagcgacctcagcacggagccgcttgagctcctccacgtcgtccttcgacagcccccgcgtgccatcgagaggcctcgcgtgcacgggccacccagttgcctaa

SEQ ID NO: 192405 - DNA, 208 bp, Arabidopsis thaliana landsberg
gcgagctcggaggaaagacgtgaagccgagggtttcttgtcatgtgtcgagtctaggcataaggaataccgtgagatgctgaggtactatgatgaacgaagatctgacatcgctcgaaaaatggctatgctggagtctcatcctcgccattggcttaagaatggttttcagcttctggctccgatgccggacgttcttttgtcgtact

SEQ ID NO: 192406 - DNA, 181 bp, Arabidopsis thaliana landsberg
gacagtaaagtaccatgaacatgagtattggaaatttggagaggatggtaacaaatactttcgacatgctacaggacagatgtatgccatctccaaggatcttgctaattacatacccatcaagcagtacgtacttctgcatccttttcataaagagccttccatcaaatgtttgtcctaa

SEQ ID NO: 192407 - DNA, 108 bp, Arabidopsis thaliana landsberg
atggccaaacctcataagagagtcaatgcctatgagtcaagagatcaaacacacgagattatgggagccattcatattgaaaccaccatacctatatactgtgtccac

SEQ ID NO: 192408 - DNA, 172 bp, Arabidopsis thaliana landsberg
gcatcaagatcacctgccaaaccatcagttttcaaactcgttactaaatcagtcatggatatccaacggttataccatggttgatgcaaatagtgacattggcaatgctgaacgcaaaaactacacctacatcgagtggcaactagagttacgaccagaagaagtggtgtaa

SEQ ID NO: 192409 - DNA, 51 bp, Arabidopsis thaliana landsberg
acattgaacccggctcatatctatgccgaagcgatcaaaaatataccctcg

SEQ ID NO: 192410 - DNA, 707 bp, Arabidopsis thaliana landsberg
atggataagccagggaaggagacaaatggaactactgatgttttgagatcaaaactgtgggagatattgggaaaagcttcaccagcaaataatgaagatgtgaactctgagaccccagaagttgagaagaccaacttcaagttgagtcaagacaagggttcaaatgatgatcctcttattaagcctagacacaattcagattctatcgaaactgattctgaaagccctgaaaatgctaccagaaggccagtaaccagatctttgttgcagaggagggtaggagccaaaggtgtccagaagaaaaccaaagctggtgccaacttaggtcgcaagtgcacagaacaagtaaatagtgtattttcttttgaggaaggtttgcgcggaaaaattggcactgctgtgaattccagtgttatgccaaagaaacaaaggggtagaagaaaaaacactgttgtaaaatgccgtaaggctcattctcgcaaaaaggatgaagctgattggagtcggaaggaggcgagcaagagcaatactccaccacgttctgaaagcacagaaactggcaaaagatcttcatcttcagacaaaaagggaaattcccatgaccttcatccacagagcaaagcccggaaacagaaaccagatattagcacaagggaaggagattttcatccatcgccagaagctgaggcagcagctctgccagagat

SEQ ID NO: 192411 - DNA, 32 bp, Arabidopsis thaliana landsberg
aaatttgtggattatattataaaagataattg

SEQ ID NO: 192412 - DNA, 373 bp, Arabidopsis thaliana landsberg
atgaagaaaacaagccattggctcgattatgccaagctgagggtttcttatggcgaaaacggtaacagctccatcgatgccttccaggctctggctaccctgggcgcaggcacttatgtatatgtgaatggaagcggtacagccaacaatgtgatcagcgtattctctgccaacctggctaaccccgaactgaaatgggaaagaaaagtggctaccaatttcggccttgactactcattgttcaggggactggtttccggttccgtggagtattataattcgcatacaaaagacctgctggtacaacgcacacttccgagcgtaacaggcttcagtagtatatatgccaaccttggagaaatacagaacaaag

SEQ ID NO: 192413 - DNA, 354 bp, Arabidopsis thaliana landsberg
tccggcactttgtcggccgtggccgaaaagctgggcgtgacgccgatgcaggtggcgctggcctggttgctggcacgcgcgccgaacatcgtgctgatcccgggcacatcgtcactggggcacctgcgggaaaacctggccgcggccgagctggtgcttgcggacgaggtgctggccgagctggacgggattggcagcgagggcaagtaaaaaaaacagagtgtggccagcgacagcttgccatcagctggctacaacctatcgtgttcgtcatcccggcgcaggccgggatccagtagcgaccacgcttgcacagacccgacggctactggattccggccttcgcccgaatga

SEQ ID NO: 192414 - DNA, 86 bp, Arabidopsis thaliana landsberg
atgttcaaagatataactcaatttcttttgcgctatgttagttttcataaacactatttggcgagaacgcaacaagaaacaacatg

SEQ ID NO: 192415 - DNA, 115 bp, Arabidopsis thaliana landsberg
gttgggaacaacgggagacatggctgctgcggctgctttcttagcatcagatgattcttcttacatcactggggaaacgttggttgtcgctggaggaatgccttcaagactctaa

SEQ ID NO: 192416 - DNA, 53 bp, Arabidopsis thaliana landsberg
ccgcaatataccataactcaggcgtaactgccgctgtatcgcgttacggctga

SEQ ID NO: 192417 - DNA, 81 bp, Arabidopsis thaliana landsberg
atggcatcactttgtcttcgtagccttgccatatgtgaacagaagaagagcccttttccggtccagacagagacgggtcag

SEQ ID NO: 192418 - DNA, 866 bp, Arabidopsis thaliana landsberg
aactaagagagttgaagtctggaaccagttacatgagttatctgcttctagatcccctgcctggattcttactggtgactttaatgacattatccacagttctgagaaagttggaggtcctcctagacctgaaggttcttactctgatctaagatctctgatgtcctcctgtgacctgtatgacctaaaccattcgggtaatttcctgtcctggagaggaaaaagacacacacatcttgttagatgtcgactggatagggttatggcgaatagtgactggatcatggcttacccttcgggtcgcagcgagtatctccgctttgagggttcagaccatcgacctcttgtgacctcctctgatccaaaacagaagaaaagacgctgtatcttcagatatgacaggagattgaaagataattctgaaatcaagaagctaatccgagaggcttggatttcaaaccttgaggcttctgttgaccaacgaatctctgcttgtcgatcatgtattatcctgtggagtaaacaacaacatctgaatagtcaggaagagatatctattctccgggatcagctcgaggaagccatgtctaatggcagtgctgatcaagaagctattgacctcattaatacaaacttgatgcgtgcttaccaaagagaagaagcgttctggaagcaacgaagtcgcaatctctggctggctcttggggataaaaatacgagctactttcatgctgccacaaaaagcagaagagctattaataatatagctgttattgaatcttcagctggtgatccagtctatgaagaagaggaaattgttgctactattgctgagtattatcaaaaaatctttacctctttgcctg

SEQ ID NO: 192419 - DNA, 253 bp, Arabidopsis thaliana landsberg
ggatcataaccgtcgcgacggagaccgggtacatattcagagttcccaaactggtactcaacgatcatgtggagggctctcgcttaagctttgctctattggctgcctcctactcctgctgaggcgagcgactagggacccacatggagaaacgtctgaagtacgactaggtctggcgacatctaaagggggctccatatgtcgatcctctactgtcttggatcctcgaacacaaacacatagcttgatctga

SEQ ID NO: 192420 - DNA, 227 bp, Arabidopsis thaliana landsberg
gatatcagctatgctggtggtggggattagactctaatctcgaaaatcgagaaaccctaatctctcagctcttcgaaatccagagaggcgaaacaaagggaatgaggattgagttgtttgaatatctgcaaactcacatcacaggtcagatggaagagaaagagagagagagagatgatgatgaaggaaagatccaacggttgagattgatgcgatcttttcgatag

SEQ ID NO: 192421 - DNA, 138 bp, Arabidopsis thaliana landsberg
aacaattcgatgccgtttaataaatatgcatttttgacgacccacaattcatatgccattgaagggaaagcgcttcatgtggcgacccaagaagatactatagttcaacaactcaacgtgcgttttattaatcaatag

SEQ ID NO: 192422 - DNA, 679 bp, Arabidopsis thaliana landsberg
atgagatttacacattacgaagttggatgtacaatcatagagatcaagcgaccggtgaggtgacgagagagtattgtgacggactgtgcagtttcaatattctgtccatctcgtaagtgtctcaatgagaaatatttggaatttaatgtagtcaagaaccatctttataatagaggatttatgccaaactactatgtctggttacgtcatgaagaggattggaaaccctaatcgaatctttgtgtaaccctacaactttgtgagggatttgctacgaggactcgcaagtcccttgcaaagttgaagcgatttcattggttgtttagtcggttcctcgcaaatccctagcaatgttgcgagggatttgcgaggctatttaagtttatatatacaaccacgcgagtttgagcgaagctgaaaccaagccgtctctcttccaaaccctaaaaatttcttcttcgtttctctctcgatctgacgactgccgaagctggtcgccgccgtcttgaccttcgtcagcgatacagagagccgtcgtgtcttcatcttcttcgccgtcgtctggagcttctcatccacacctgttcttcatcgccgtgtacctggagcttcttcggcgacgtctgttcatcctctccgctgtgtctacctcttcttcgccgccgtctggaacccaaag

SEQ ID NO: 192423 - DNA, 396 bp, Arabidopsis thaliana landsberg
atgaggacagacttcaatgaaagtttcctgctacaaaaattgaagagatcttcaagacttggtccgagtagatccatcaccaaaacattatagtccccttcaacaccaaaccatttgacatttggaacaccagctaccaaagttaaggcaaaagaaaggtcataagtaacacaaactttacattatcagaaatcaatatctcattcagaagaaaagaatcattactccccccctgaagaatcccgtacaactacgaatcataaagcagctgtggatgctctgtcttcacattttcctgggaaaacaaaaacaaagagaatcaaaacctcaacttttcaacataccggacttgatcaaactaaacatattgtgataatgttacttataaatccataa

SEQ ID NO: 192424 - DNA, 298 bp, Arabidopsis thaliana landsberg
gtgtgggataggcgttgtttcattgggagagataagccagctggtgttttagtgggacacctcgaaggtgttacctttatcgatagccgtggagatggtcgctatttcatatcaaatggtaaagaccaaactatcaaattgtgggatatcagaaaaatgtcctcaagcgcacctgcaaggtaactattttcgatataaaactgtattcagccagtagcattattggtcgcaatttgtttgttggtgtatcacaaagaaattcttaatgaaactaattgttctatattacagggcataa

SEQ ID NO: 192425 - DNA, 251 bp, Arabidopsis thaliana landsberg
atggggtcaagctacaagagagcaatcttagaagaacaactagcaaatgtgttaaggcactggcaaggtatggttaaagaaaagaggaagactaaccaaacgccagaaacctacaacaacagtaacaataacaatggtgatattgattctggcgaaagtccagttcagacagaagttgcttctgagtttagattttcgggtagacaatcgccgattttacaagagatacagatacaagagaaaactgaaag

SEQ ID NO: 192426 - DNA, 118 bp, Arabidopsis thaliana landsberg
atggaagtcagcgaagcggaaattgcaacagccaggatctcacaatgccgacaatcaaggccagaagaagaaagaactgcgagctatgtgaatgccacattcaatgagaaatttagcg

SEQ ID NO: 192427 - DNA, 282 bp, Arabidopsis thaliana landsberg
atgctcccttcttatatacactttcaagactcacatgtcggccacatctctccaaatcatcagtcccaaattcccaacttggaggccgttgcgaaagaggcagctgtgaagcagactagcccagcagcagcttcaggtgttgctgtactgttgatgtctgtgaggctgagcaggactggtgcgggtcaggtttcgaagttttggtttcgtgtcttggtcaggctggagacggtgccccaatcacggacgtgattcgaaacttgaacttggtggtttttgaag

SEQ ID NO: 192428 - DNA, 59 bp, Arabidopsis thaliana landsberg
atgaatcacactcgtttcggttttgcagattatctattcgagttacagttgtactcaag

SEQ ID NO: 192429 - DNA, 1045 bp, Arabidopsis thaliana landsberg
atgccttccttatccaccccgccgtcccaaaatctcgccttctcccctgccgcttctgccacgtcatccagactcactccctcctccaaaagatctttttaccctcatcgtctccccgatcccaccgctctctgtcgctgctcctcctcctccggcagcaattcttcctcttcctcttcctccgatgataaccctagatgggactctgcgattcaggatgttctcaagagcgccatcaaacgcttcgattcggttttgagctggtacgctactctggataacgatgatggtgagcaaggatcggagaatgtcgagaagattgatgatgattgggattgggaccgttggaagaagcatttcgatcaagttgatgaccaagaccgtcttctctccgtcttaaaggtttcctcttgatgattgtatctatcattgttgttaagagtcctgaagaaatgtttctaatgcggggattttgtattttggggtgtacagtcgcaattgaatcgagccattaaacgagaagactatgaagatgctgcgaggctaaaggtggcaattgcagctactgctactaatgatgctgttggcaaagtcatgtccactttttatgtaataactcgagttgtgattatagtttctaacaacactgtttgggatacttacttttgattctgaaagattccatttttgtatttgtcatagagagctcttctagaagagcgttacaaggatgcagtatacttgcgagacaaagctggtgctgggttggtgagctcattatttgtattttttttcgtttcttttataactgtggtttagcttcttattggtgttacattgttttctctatatggcttgcaggtagggtggtggtctggtatttcggaagatgtcaaagatccgtttggtcttattgttcaaattactgcagagcatggaagatatgtggcaagaagttataatcctcggtacttctgtcttctttactcatcgatttatctgtggcagtgtgggttttgtgtatcaaaacgccaaatttctcgag

SEQ ID NO: 192430 - DNA, 1007 bp, Arabidopsis thaliana landsberg
atgccatctaactttcgtccagaaaaccttgttaagcttcaaatgtgtgagagcaaactcgaaaagttgtgggatggagttcatgtaagtttttagtaaagttataactaatatcgagattagaatgcttcttttaaaggtaaaatgtttaccctttcaagtgatatgtaacttacgtatacttcagtcacttacagggctcaggaatatggatttgcggggatcagaaaacctgaaagaaattccagatctttctttggccactaacctcaagaaacttgatgttagcaattgcacaagtttagtggagctttcttccacaattcagaatcttaatcaattagaggaattgcagatggaacgttgcgaaaatttggagaatcttcccattggaatcaacctcgaatctctttattgcctcaatctcaatggatgctcaaagttgaggagttttccagatatctcaacaactatctcagagctctatctaagcgaaacagccatagaagaatttcccactgagttgcatttagagaatctatattatcttggcttgtatgacatgaagagtgagaaattgtggaaaagagtgcaggtatgttcttattctaatgttttctccaacctttttctaaactcacgtattataagaagttaatgtcacgttgggtttgatttcttaaacgttgtgaaaaaagtttattgagaaaactatctgtgtaatgcttgtggttactatctataatctacgtgaataattttttgagtgattgagtgattttgttaacatctctattttgtttttgtttttggttcagccgcttacaccgctcatgaccatgctgtctccctctttgacgaagctatttctctcagatatcccaagtttggtggagcttccttcttcatttcagaatctccataatcttgagcatttgaacattgcacgatgcacaaatctggagactctttcactggagtcaaccttgaattacttgacaacttga

SEQ ID NO: 192431 - DNA, 69 bp, Arabidopsis thaliana landsberg
atgagtgatggaaagagagtagataaattggcgtttcgagggagagagacaagaggagtagtagatttg

SEQ ID NO: 192432 - DNA, 390 bp, Arabidopsis thaliana landsberg
atgcgcgccatggcggatcgcggcgagctggcggcgggatcggacaccacggcctatctggtcgaggccatgaatttcgtgcgccatgtgcgcgacaaccggctgaacatggctgatctggtcgaaaagtggcgcgatcagtcggacctgttcaaggacggcgacgctttgtcgccggaagcgcaggcctatctgacgctgatgttccgcgacgaaacctatcgcacgcaacgcagcgccgaggccattgcggcgtcgctcaatgacatcgtcgaggccgcgatgcggaccacgccggatgccaacctgttcgggcaggttgacacttttgacatcaacgcgcagattagccgtctgatcgaccgtgccgccaatgaggatgcacaccat

SEQ ID NO: 192433 - DNA, 83 bp, Arabidopsis thaliana landsberg
atgagaattatatttgtttttgccaatcgttacaacggtgatggtgaaagttggagcagaggagtcttcgttttgcatttcag

SEQ ID NO: 192434 - DNA, 34 bp, Arabidopsis thaliana landsberg
gaaaatgttttggtgtgaggaggaagatgagtga

SEQ ID NO: 192435 - DNA, 96 bp, Arabidopsis thaliana landsberg
aatgtaattcgaatctcccatgaagtgaatgaacaacgtgaagatgggaaagataagctttcaagactagagctttggtttagacgactactatga

SEQ ID NO: 192436 - DNA, 290 bp, Arabidopsis thaliana landsberg
atgataccggtttgagttatagaggagataaagtaataggaaaacattcccaaagcttcttcacaaaagtttatgagagtaatagtcgacaattttctacaatagactttgcgggcttaaaagctacagtcaccaaacaaatgaacgatgacctcacaaaggaattcagcgacaacgaaatctttgaggcaataaaccaaattggagatgataaatcacctggaccagatgggttaactactagattctataaattttgttgggacatagttggacaagacgtgatgtag

SEQ ID NO: 192437 - DNA, 141 bp, Arabidopsis thaliana landsberg
tggcaaccccacgtacgacatcttcgccaccaacggttacctactggactatatcaccagtcgagccgcacgcaacaggcatgagtgtataccagtacccggtatcataaacttggattgcaagcggggggcgttgatctt

SEQ ID NO: 192438 - DNA, 340 bp, Arabidopsis thaliana landsberg
  unsure (1)..(340): unsure at all n locations
atggatagtgaaggtcaggtggggaagtccgaagtctctttctgtcttactcgacctcttagagaatatctccacctgcaaagaggacagaaactggatncgtttcttccttgaacgcgttgtaggcacggttcatcagcacgaacagactggtctgttcgtagagatactcgatatcatcagagataccaagctccaccattgtctcaggatgcgggtacctcgttccgacgaaattgtgtcgcctgaagagctcacagtactcttccatcgagacatcgttggtctccctcttccaaggcttagattcagcacttctcaccgagttgtagtcgatgag

SEQ ID NO: 192439 - DNA, 90 bp, Arabidopsis thaliana landsberg
ttgagaatcaatcaggatgacacatcttatgacgtttggtggatgactaatgttaagcactccgtcaaccgcaatgtcgtcatcttcatg

SEQ ID NO: 192440 - DNA, 129 bp, Arabidopsis thaliana landsberg
agctgtcaaagccgaggaagagggaatcgggaggaagagagagatccgccattgttgattgatccaaagtttttcacaggtttagaggaagaagaagacgagagagagatgtgtcgtcgtttttataag

SEQ ID NO: 192441 - DNA, 124 bp, Arabidopsis thaliana landsberg
atgaaacagctcgtctgtatcaagagtccgtggaatcgtttcaaggggataatgctgcagctaagacttttgttagaggtgacaatcaatcccaatgataataagctcaagcctgattctcaag

SEQ ID NO: 192442 - DNA, 390 bp, Arabidopsis thaliana landsberg
atggctcttctagtaactccaagggtccctgagctcgttgcgaaaccggagcttaaaaatcttgccaaatcttacgggaaattttggtgtacatggcagattgaccgaggtaataaactcatcttaatatgatttttttatatatttgatatgattatagatgatatgagtttagtaacttaggttttttgttgtcttgttataggggataaattaccactaggtgtaccatcactaatggtatcgccacaagacgtgaatctcgggagaatcaaaccggagttggtgaaaaagagagatgaagaacatggaatctcgactgaatcgttgaagccgtcaagagatgggatctgtggaccagagaagaagaacctggttgctgattattgg

SEQ ID NO: 192443 - DNA, 144 bp, Arabidopsis thaliana landsberg
atggtggtggagaaagaaagaagcatagaagaaaggcttttgcagctcaagaaccaaaacgacgattcagaatgtcgtattactgcttgtgttatccttagtactttcatcgctgtgtgtggttctttctcctttggtgtctct

SEQ ID NO: 192444 - DNA, 873 bp, Arabidopsis thaliana landsberg
atgggggagaaactaataagtgtgaatgttataaatatgaaaaatggggggaaagtgaaaaacactgataaaaaggtaagaaaatggagaatcttttttttttttgaataagaaaatggagaatctaagtataattaactctcttggacatatgtgtctatgataattcataagaatatcacatagatgttaatagtctactatatctattttagaacatgacacatgtcttcctaaatcttaaaaggaagaaaatatgccaaaaagttgaccaatcaagaagagagtaaatttaaggatttaggatgtttggtatatttcaaaacataaacaaacgcagtagagtaaataaactaaaaaaaacgaaaacaaaacaattaactcttgtatataaatgttaagagatctttatcatgccacagtttttattttcttggacaaagtttatttttcgtggtcaaaagatttggatttctctctaaatatagaggaaagtacctatcgtctcctaaaccatcaccactacaaataccctttttgtgtctccatcaaattacatcttttcgtagacattctctctcgatctttagttttcataactcatcttcttttttactttttttttttttggaagatgaatatctccgtcgaaaaccctgtttttggtaaaacatctatctatcttcctttgttattcttttctttgaagtcttttttcttctataaattttatcttgagatttcgtaaaaatagaagtttttttgtttcttttttgttttgtttaagtacatgaggactcgacaacgcagaagaccggagagttacgattggacagcgacataccaatgtcgaagatatcatccgatgatgaa

SEQ ID NO: 192445 - DNA, 136 bp, Arabidopsis thaliana landsberg
gttaacaccgcctgattgggaccttactaaagggatccttaaagacaagttcacaactgattgggaccaaattgcaacacttattgcaagggcaacgttatatcgttacctcattgctgtttctgaggttctctag

SEQ ID NO: 192446 - DNA, 6 bp, Arabidopsis thaliana landsberg
atggag

SEQ ID NO: 192447 - DNA, 143 bp, Arabidopsis thaliana landsberg
aattgacaagtatggttgttagagaggaggaagaaaataagaccgattttaatggcggtgactcggaagccacaggatttgaggatgagtccgatgctacttgctgtgactcctttgccgagtccactcactactcctcctga

SEQ ID NO: 192448 - DNA, 154 bp, Arabidopsis thaliana landsberg
cattcccaacacggcgatcaacgtcgtgaccggtgccgacacctggaccaacttcggcaacccgaccaacggcggcgccaacggttttgaggtgcgtcccgaccagtcgactaacacgtaccagatcaaggccggcacggacaacgccaaccag

SEQ ID NO: 192449 - DNA, 154 bp, Arabidopsis thaliana landsberg
cgtacagagtcatagatatgcaagagatatataagaacatgacagctaggagaaacttatactattcaaagaaaaagctggaggctatggtaaattcacgaatcgatagattacacaatgatgataggcgaatcatgtattcgtggacctcgcg

SEQ ID NO: 192450 - DNA, 82 bp, Arabidopsis thaliana landsberg
atgaaggtgagaagattaataacaaaattagcccaagctgactcaaatatgaaaccagtagatgtttgtccagcaagaagag

SEQ ID NO: 192451 - DNA, 166 bp, Arabidopsis thaliana landsberg
acgtagctgccgtacacgtgttagatttgcacgagatctatttctaatcgaaccttttggatttagagaaagtccaaaaacccaaaaagctgtggtagggcccaaagtagagcccagaagacttttgcggtgtcgctttcagacaaagacattggtggagagccat

SEQ ID NO: 192452 - DNA, 1065 bp, Arabidopsis thaliana landsberg
atgggctcggatccggccaaacattgccatgtaagttggaggggcccaaaagaggaaaggcccacaggcctttcttgagcaagaatacaagcggagtgattgatccgcgaggtgaatgtgacattgaggtcaaagctgcccggattggagagtcgaatggaccgacaggtgaagcccaggaagtccggaatcaattcaaattcgaacgtttgaatagttaattcgaagactgaaacggatacatttaagatagaataattttgtgtaaatgggaatttaatgtattctttgggtataaattatgggtcaaaggccatgtaaagggacacgcatttttgggcaaacttactatacgcattttcctacaaagctcatagttttctcaatagtcatcaatctattttctagtacacctgtcctcaagaataatccttctcactaaataaataaatatttgagtgtgcgaatccgacatccacattttggcgtcgtctgtggggacggaggattcttgaatcgtcagattttttatacaacattttcaagataagcagcaatggccgagaagacgccatcattgcattattggccgaaattctcaaaatcatgcagcaaaccatgtcggacatgtcacgtaagttctcggatgtggaaaaagccgttgatacactacaaccaacccatgtatcttttagacaaaatgtcagtactatagaatctcgtgtttgttctatgaatgcaggaaatcctgttggagttcgaaggactattttcaattcgccaagctcccttgcgcgagatggaaccagcggacaaacaactccagatgccgctaacatggtagttcagccgggagacggggaaacacagctcggggacgaagaccaattcgcagatcagcacgagcaagaaagtctcgaccagttcgagaccatgagaaagggtagtcgggaactaaaagaaataaggtcaaagttccatcaggccactagttcggagtcggatatcaatcaggtcattgaagaagctaggcgaacacctttcatcccaaaaacgaaagtttga

SEQ ID NO: 192453 - DNA, 759 bp, Arabidopsis thaliana landsberg
gataaaagtcaaaccaagaatgatgatgatcattcatttgccgaggaggattcttatttctccggtgagcaatatgtactcgctaaaggcattgagccagttactgcttccaatgatccgatgggtctctcaatgactgaaacatacagcacgaccaagcaagctgatttggttgctcgatatgacgggcaattgatggatgcagaggagctaagtttgatggacactgaacctgtgtggaagggatttgtcagccatgaaaatgatgtaattttgttgaagaaagggaaagtcgaggacaactctggtagaatctgtccgaaggatatccgcgcagaagatgatcgaaatgctgcagttaggtcaattggtgtaggaatgagcgatgatgttgatgacaatgggagtataatacctgaatactttcctggagaaggtagtgaatgggatctggagctccttccttatcgcggagttggagttgctggtgttaagcctccacctggtaaagatgcgagtatgctgcttaaaaactttgcagatggtggattctcatttccctctccagtagctgatagacagaagtcccaggatgattctgcaaaccctgaatggtcaaaccattgcgatgctgttgtgagaaatgaaagtgatgaaccaaaggggctaatcaagtccgatagcatgattgtctcttcgacaaaaagatgcagtggctcttcttctgaaagaaatttaagagacatggatgatgaaaag

SEQ ID NO: 192454 - DNA, 123 bp, Arabidopsis thaliana landsberg
atggggttcgacccttgccgaggctactgcttgaagaactgcaaatgtcaagcttttgcagttaccagtaggtccgacaactttgagaaagtgaagtttgtagtgtgttcaaaattgtcttcg

SEQ ID NO: 192455 - DNA, 291 bp, Arabidopsis thaliana landsberg
gctcaacaaatggcggacgacttccgattgatcaaagagcgccgtttcctcggcctcactgagcgtctatggatctggctggggcgcacggctgcacttgccttgttggcattcgcgtgcggcttcgccatgtatcttggcgccgatcgcttgcagaatgtcgcatcccgcgcgttcggctgggcacaacttcagatcgtcgggacccggaccacgcccgccggcacattacgccggatgggattctgctacagcggcttacgcatcaactgcgtggttgatggcgacacc

SEQ ID NO: 192456 - DNA, 197 bp, Arabidopsis thaliana landsberg
ggggcgaatggatgcttcccgaagcatcacatccgttccttgcaaccgttcgttggtacctgctcgaccttacaccttttggccgagacacctcttcacccgtgagctaccacagtccaccagctcgagtgtcagctgaccggaccacccagctgggtcagtacacgatcagctcactgagctcagtcgagctgtcg

SEQ ID NO: 192457 - DNA, 216 bp, Arabidopsis thaliana landsberg
gactttaagtgtggtttttcaaaccgcttacgcggcctgagcaaccggagcatagttgtcattcgcaactacacagatggcccgatatcggtggtaccatgccgagcaaaagcaacgccctttacgccctcgtcgatcctatttcgcccccgccgaaacccagaattcgctaatcattctctgggcttgggtggaggcgccgggtaccgccccccg

SEQ ID NO: 192458 - DNA, 1032 bp, Arabidopsis thaliana landsberg
atgtgcgagagcaaaatctttccaaccgttggtaagtctctggccatctattttcaccttctaggttttattggatgcatctgaccttaactctgccgtcttctgctcatttcttccttctatattctcaaagaagaaggctaaaggaattttctgaagcaccatgcaaatacaaaaccaaaagcattattctcaatgatcttctcagagggacatatacagagtagagaaagatttaccaagtggctgtgaaagccaggaaaaagtggcttgaagaaatgttgattcgccattatttttgctccagaatctctcagcctttacactgcggtctcaaggaggaaaaagtataataaagtaataaacacaacgttcacttcacatttttttttttttttttttttttttttaactaaagactgttcggtttccactaggtgattgaacaatcaacatataggaacttgagagctttagaaaaagtaaaaccagattacttttttatataaaaacaaaaccatcaaattctttgatagtgtatgtgtcattatgttacatgctttcatattaacaatctttacccattatggtaacttcagaacaatcataaatttcttcataaagacgaggacaagaatctccctatgcttgcactacactagaggaatgatttatcgaacttgctacttgtgttcagtgaaaaataaatacctgaagcttatttcatttcttgtgcggcctatctttggcactaaggcataaataagagacgaacttgactcattttaataccctgaaatgtactggtaatctgctacagtctatcaaatttgtagccatgaaagcggcttggtaaaactgctgcagattgagtttcatatgattttggaacttctttccaatgcctttggcaactttgaagggtcacaaaaaaaacacatgagcaaagtgataccaggaacagagccggatgcatctttgagagttcatgagacgacaatttccatagacatggttgtggggatactctag

SEQ ID NO: 192459 - DNA, 37 bp, Arabidopsis thaliana landsberg
tccatggacacgtacaaagcccgaaattcgcggataa

SEQ ID NO: 192460 - DNA, 245 bp, Arabidopsis thaliana landsberg
aagacaaggcccatactgatatcgtgtttgtaataccaactaccgatatcatatcactgacagcttcatcaaccatttcgatgataatgactaaagctgaaaagacatacgttaagcaacattggcccaaaccaacattgaccttaacactgtggttatttgccgagccacctcctaggcattcccattctagtgaatatagaaggttttggacttttgatgaacaaattatccgaaaacgttag

SEQ ID NO: 192461 - DNA, 575 bp, Arabidopsis thaliana landsberg
atgactccagccacagagataagtgaagtgtgttccattccaagacggtcatccaaaaaggtttcgtcaatagcaaagctttggagatcaacaggtgcaagcaatggagatagagatagcgtctacaaggtaatatcaatgaacggtatgtatggaggaagggtttcatatgggagaaagtcaagcgcgggaatggtttcaccagacagagtctcgagcaaaggcggatatagcccgatgatgcatttggttggacaatggaactcttccccggaatctgcaaatcatcctcatgtaaaccgaggaggaatgaaaggttgcatagaatggcctagaggtgcacagaagagtagtttgaagtcaaaactcattgaagcacgaatcgaaagccaaaaggttcagttaaagcatgtccttaaacagaggatttaggagccaaaccgtttttggtcacagctgaaccagatcttaatacccgggacactgcgtgcggttctctaatctttcaccggtttcagatgctgtatgatgtaataatgttccgggaaagcagtcgggaccagcaagcagcttag

SEQ ID NO: 192462 - DNA, 1392 bp, Arabidopsis thaliana landsberg
atggtgagtaagtaacttgtttattcaaatctatcaccttgatcttaaatcatttttgaaatatccattctatgactatgtaacttattcattaaaacatatcattctatgactacaagttcaaaatagtcacagaatatttatatatttttatactgaaatgtaaatatctttatatatttatcctttttgttttaatataaatatttctatttatagtaacttatttctacatgcaacatttcaaaatatctttttaaattaaatatttatatgttgatttctatatatgtgatgccattctgacaaataaaaatattaatagaatccaattttaccgtaattgacatatttgtgagataattttgtttggatacgttttgcctaattctcaaatatatatggctgagaagcttaaaagatatatttacaaaattcttctatctctttgctatctctccggagagcttccacgaaattaccccggtggcagaagtgacggtggcaacagatgtggaagccaccgctggtcaccgtagcggtggctttcgtcctggcattacctcaatggccgtgaagaagtgaacatgtagacttgtccgcaacggatgatcggtggatggggttgagttgagtaaacgaatgctgcagaacattagatgctacgtgggatcatcgtagattcctatccacgctttattctttggacgattatttgctgttacctcaaggacgatattttaagtaaacattgcttccactcacaatcagaccaatagctttgacccgaagaagcaaaattctgctccgtctgcgacgtccattattcaagcatggtctgagattcgtgaatctctccaaaaccaaaactttgattcacgttaccttcaagctttcagagatttggttagctctaagtccactatccatgttgcagatccccaagcaaagctactcatttccatattagctttacgagatgtatctctttcatctgaggcttacacacttgttctcagacttctctatgtgtggattaggaaatcatttcgaccgtctcaagctcttgttggtttagcggttcaggcaattcgtggcgttgttgatgacatgcgtaatctccaaccagccttagtagcgcaaagcgttctgttctctggtgcgtttgcttgtgttccttctctgtcaggagacgtgaaagtcatgacaacaccgtggttgattctcgatcaatcccgtcaaatggaaagagagacacggctaagacatggccacatagaatctctgaccgggaagatgacggcgctgatgatcctgaccggaagtggatcggcggcggggagagacgcttggatggcgcacacggctatgggcgtttgttcagctctttaa

SEQ ID NO: 192463 - DNA, 58 bp, Arabidopsis thaliana landsberg
atggatgtttggcaccaatatgacattttagtaagtatggtagtgtttgaaatcagac

SEQ ID NO: 192464 - DNA, 37 bp, Arabidopsis thaliana landsberg
gcacactctaggatttccaattaacccaaccgattaa

SEQ ID NO: 192465 - DNA, 1209 bp, Arabidopsis thaliana landsberg
atggtcaatcaagcgagcctcatgtctacgcgtcgtcgttttcaacttgttccgggttgtttcgtcatccaaaaaagtgtgtaaacaacacttggaagtaacttattcttgtcttaacaaaatccaagcaataatcgacaaaagatgatgagaaatatttgaggttttgaatcttgattgttttctatcaacgaatattccaaattggatttatggttcgaaggttatataaggaaatggtatagttaagtttaagttatattgactttgtttgttttgggggtttgacctttgggattatccaacatcctacgtttcggaaattttgaactaacacggtgcccacttggcagctcactacttgtaatatgatactctcttaaatgcgtgtcttcttatgacttcatcttagaatatcatacttcatgtaaggattttggtatatgacattttataatgctcaagatataatcccaaaggtgcaagattagaatgaacttgaacttcgaatcaaattgtttgcaataactaaacaaattttgaactcagattcaatgttgttcaacataacattgatcatttttcaaccaaatgagcttcgaaagtttggattttacaaaataagagattaagggtaacaaacaaaggcaatttccttggtgctcatttgacacattttacttaagaatcatacagagtctctatgaacacaaatgcctcgtttgactatataaacgtcctcacactgtttccacgacgctatacccattatgacccataggcatacatgctctcaaatatacactggacccgtaattaaaataacattttaatacttaacaaattagcatgtcttgaccaagagactgaagcagccaaagttgtccagagcaatagctcaagtaggcataacctattactgtgttaatagattcacaaaggcgaaacaactattactaaaccttcatggattactcatctatataagttctagacatgtgttttgaattccccggttcatcatcggtacaatagtttcagaactaaaacgctatggggcattgaatttgaaactgtgatcacgcaaacttcttaaatagaacacccattagaacacccatatgacccataggcataaaagctatcaactacactggacccataattaaagaacacagcatatcaccaaatcaacttgaggcagcctag

SEQ ID NO: 192466 - DNA, 124 bp, Arabidopsis thaliana landsberg
tcgtgatatcgaggttacagtaggctacgtgcttcggcgcagatatcggcgtgggactgcactaatgcaggttatagctcgcggggttcggacagggctgtgctctgggtctgtggcgcactga

SEQ ID NO: 192467 - DNA, 392 bp, Arabidopsis thaliana landsberg
atggtggtggtggatgaaggggagatgaaattatgggttgacgacatgatggactacggtggcgatggtgagccggtagcaccgccgtacaaatacttgtgtatatacgcacatatctacacatatagaaggtgaagattgggtttgagtggatttgcatgatccgatgttcagaaactcatcatcatcatcaaaaactcatcatcacaatttggttattctctaaagttgaaacatttgggttccttatgcagtatctttttagggtttagttttcttacatcaaaaaccaattaattgtttattcggttcatcagacagtcgttggtggcggagggattgttggtggcggaaggatcgtgaagtcggaagaagaagaaaagatgtgttga

SEQ ID NO: 192468 - DNA, 72 bp, Arabidopsis thaliana landsberg
gtgttgctggtttgctgtgcattcaagaacggagattcctatgcgggaaatgttccgctcaaaactttcatt

SEQ ID NO: 192469 - DNA, 24 bp, Arabidopsis thaliana landsberg
atgggccttacagcaccgccaatg

SEQ ID NO: 192470 - DNA, 261 bp, Arabidopsis thaliana landsberg
gaacagagttattggtgcccgccagtcttcggtcatgaataaggtgtgctattcggtggccttcgctgtcattggttatttggagcccttcgaggctccggacggttggtgtgccgatgacgtggtagaacacgtcggagggcaggggctcgcctctggcggcagcttggccaatgcgtcggcctcttcattcttggcccggtccacatgctgcaaagtgaatcccttgaattgtctctcgagacttcggatggccgtgag

SEQ ID NO: 192471 - DNA, 159 bp, Arabidopsis thaliana landsberg
cagcacccgctgctgaggcaccggcaggcgatgcaggccgctggcctcgtggcgcccaaggacgacgtgaaggtcgagggcaacgttgccggcggcgctgccccgtcggtgtaccagcagatgatgtgcagcgggctgcggttgcgccagcagatgtag

SEQ ID NO: 192472 - DNA, 1056 bp, Arabidopsis thaliana landsberg
atgattaaggaaattaatgaccgtcgatcaaagatttactgggtcccacactaccaaaataagaccgttagacgtaagcaaagaaaaaaaagaagggtaaaatcgtcaacagaagaaaatctctaaagaatctctctaatttttctatgagaccgttgagaaaccctttttaccattaaataaagtctttttgcaaacaacaaaatctggttaaccaaaatagctctctcttttactgaagaagtgatcgaattttattcaacgatggcggatataatctcaaatccgaccatggaacaactcttcttctctgtagatccgatgtctcttatactctctcaaaactccgacacacatcaacttaaactcttgttagacggtttctccggattcgaaagaggtccaagatacgatgaatactcgagattacgtgaatcgaagcttcgcatgaaacgtgattttcagaaattcctcgaggaagaagacgaagtagacgagccaaggatcaaaaaacaagtcagattcgagggtaattctgtaaattcgcaagaaggtgataagtattcgccggagaagaagaaacagagtcggttcgagggtatttcagtaatttcacaagaagataggttttcgccggagaaggtgaagaaacagagtcgatttgggttttctccgatgagaaaagctgttccgtcttcgttggcacaatcagttcctgatttctctgctgtgatacgtaaagagaatcgtcgtccggttaatatcaacactattactccgccaccaccgacttcgaagagtagaaacggcggcgttttgacgggatcggcttcaagagggagcaagtcggcgagtgctggagagaagaagagtaaagggatgatgatgatgggaatggcacgtaagagttacgctaatgttgaagatcttaagaagatttcaatggcggctgcttctgctattaatggcggtggcggtggaggaggaggagggagaaaagttggtgactgtggtggtggtcgtcggactattcttggttacagacatatttactga

SEQ ID NO: 192473 - DNA, 30 bp, Arabidopsis thaliana landsberg
aacaaccggcacgacgatgttatggcctaa

SEQ ID NO: 192474 - DNA, 657 bp, Arabidopsis thaliana landsberg
atggcgaagatgtggacaaacatgtgtatacaccacgacacccaactaggtattgttggagagctaaaggcccttgaaatctcaacttctctcaaagaaaccacaaaacagcatcaccatcagactcgccagttctgcaccgtcttggaagaatggcatgttcagttcgatacacttgtcacccatcagaagcagtacattaactctctcaacaactggctgaagctaaatctaatccccatcgagagtagtcttaaagagaaagtttcatcacctccaaggcctcagcgcccgccaatccaagctcttctccactcatggcatgaccgtcttgagaaacttcccgatgaagtcgccaaatcagctatctcctctttcgcggcagtcatcaaaaccatcttgctgcaccaggaagaggagatgaaactgaaagagaaatgcgaagaaacacgaagagagtttatacggaagaagcaaggttttgaggattggtatcaaaaacatttgcaaaagagagggccaacagaggaagctgaaggcggggacgacgcaacaacaagctccagagatcatgtcacagagaggagaattgctgtggagacactgaagaaaaggcttgaagaagaagaagaagctcaccagagacattgtgttcag

SEQ ID NO: 192475 - DNA, 195 bp, Arabidopsis thaliana landsberg
gcgcggagcgcggaccgccggaccggagacagtgaagaatcaggaagggaaacacgcacctgcaccgcacggagcaccaaccgaccagctgtcaagctacaactcgatccgaggaggcgaggagcaccagccgaccaacgaggagcaccaacgatgaacgagcatcaccaatcaccagatccgaatgggatcagg

SEQ ID NO: 192476 - DNA, 193 bp, Arabidopsis thaliana landsberg; identical to SEQ ID NO: 186240

SEQ ID NO: 192477 - DNA, 302 bp, Arabidopsis thaliana landsberg
atggtgataaaaatccgatttttccacctgatttcaaaccaaactccatagattttgagaaaattcgcataaacaatccaaaatcaaaagacgaaaatgagttttttcactcgattgtttggagaaaagtagatgaaacccaagcaaaatcagaacatggagatcaaaagcattcagatttcattttctcgagaaaacagaagataaatttagatgaaatcgagagcaatgaactcagaaactcagaaaaaatctcaaaatcggtgaacggaaacacaaggagagaagaaaatgttgactga

SEQ ID NO: 192478 - DNA, 326 bp, Arabidopsis thaliana landsberg
atttgatagattggatcgagagtcaccgacctggactgatgttggctcgggtggttctcggacaagaaggaccagctttggtcttgtcttcaggacgacggttccctgtggctgaattggattttggatttggtgctcctttcctaggaactgtatgttcaacggttgagaaaataggagttggttacctgaaccagcgacctagcgcctgcaatgatggctcgtggtcggtttctgctattgtgtggcctgaactcgctacagctttagagtctgactcggtgtttcagccaatgtctgctaaacatcttcaactccagacctga

SEQ ID NO: 192479 - DNA, 488 bp, Arabidopsis thaliana landsberg
aaaagttctgctcaatgattttactctacatatgagtgttgtttcttataaaagttctgttgtggcaggcttatctttgggtgtgctaaatttggcgatagtcatcccacaggtacacttctttcaaccatccttttagcattatatttgccgcaactcaaaatcatattcttctttgaatgtttctgcctgtaaaaggaagtctataagcataacatgcagcagagttactgcattatttgtcaattgtcattaataaacgattcgtttttttagttatggtcattggccagtgatgaaagtacactttttatttctctatattagttgattgatgaatttcttccctatgttggttatggtttttggcatcaaactcaaattctgttgttcaatcatttatgtgtttgcaggtaattgtgtctgttggcagtggcccatgggatcaactgtttggaggtgggaattcaccggcacttgcagtatga

SEQ ID NO: 192480 - DNA, 237 bp, Arabidopsis thaliana landsberg
tgttccccgataaagtcatcatcatcagtgatcgcacttcaacgactgaagcaaagtgtgtgctggcttgcttgctctgaccattaccatcatcgatacaatgccgtacaatggccgcccattgaggaggacaatcacactgtttcgctgctgctggcgctctgctggtgcaacagagatagcactcgctgctctgatattcggacacaactttggctgaaaaagcagggctattga

SEQ ID NO: 192481 - DNA, 569 bp, Arabidopsis thaliana landsberg
atgctgtcttttatggacgcctttcggggatataatcaaatcccgatgaacccggaggatcaagagaaaacatccttcattacggaatgtggaacgtactgctacaaagtgatgcccttcaggctaaagaacgcgggtgcaacctaccaacgtttggtcaacagaatgtttaaggatcttctcggcaaaactatggaagtatacatcgatgacatgctagtgaagtcaaccttatctacctcgcacttcgaccatttacagcaatgtttcgacattttgaatgagttcgggatgaagttgaatccttcaaagtgtaatttcgctgttccttcaggggaattccttgggtatatcgtcaccgaacgcggaatcgaagcgaatccgaggcagataaacgctttcctgttaatgacctaacctcgcagtataagggaagtccaacgattgacatgtcgagtggcagcactgaacagattcatatcctgatctaccgacaagtgtttccctttctaataatgaagcggagtacgaatcactgttggctggattacgactcgccatcggggtag

SEQ ID NO: 192482 - DNA, 168 bp, Arabidopsis thaliana landsberg
tttggggaatggaaacttgttggggaaagcctgacattagatagaggcggtagtctcattgctaaaaacataacgtctgattatcggctgcaatcctatatggatactggccatttcttatggttaaatgttatgttctgcaatgagagagttttgtcctctatgtga

SEQ ID NO: 192483 - DNA, 151 bp, Arabidopsis thaliana landsberg
atggcgaaaacagaaaagacattactcacaatttctggtttaataacaattgttgaagttcacacacacagacctaatgggcttaatcttattgaagacagcatctggtctgacaaaaagaagatctttaccactcgcaactttccaagaa

SEQ ID NO: 192484 - DNA, 418 bp, Arabidopsis thaliana landsberg
atgaatcagggtagtagagtttctacttcttttaaccggatgcaaaggactgaagacgcggctcggtctcctcaagaaactggggacgccttgaccagtgaacatgatggttatgcttcttgcagcttcaatcaaaatgatcatagcaatcattcacaaactactgactcagcaagtgtcaatggttttcactctccagaacttgaagatgctgaatcaggtgcttcttctttcacaactacctattgaggattccttacttaattggtctcttatcttatacatattacatacattcattctgcagcatacaatcagcatggaagttccacagcttactctcatcaagaacttcagcagcctgcaacaggaggaaaccttactggttttgatccttactatcaaatctctttgacgc

SEQ ID NO: 192485 - DNA, 372 bp, Arabidopsis thaliana landsberg
atgacggatgttccggtgttgcctcacccgctgtgctcctcgatgcctgagatcggcgaccgaatcagcgcgctccgcggcgtccgcacggtgaccggcgcgccggtcgatgtccacctcggtcccaccgggctggtcaccgagctgcgttcggcggcgcgtccgcccgaggcgccggagccttcggagttggtgctgaccgattggctggtgctgccggcggcggccgaaccccacgcgcacctggacaaggcactgagctggaccggcagcggtgccaggtacggcgatctccatcaggcgatccgctcctggcacgactacgcggcgacaatgaccgagcaggacgttgccgaccgagccgggcgagcc

SEQ ID NO: 192486 - DNA, 394 bp, Arabidopsis thaliana landsberg
atgttcccgttcgttgggaagctcctagtatttaacgccgaagtgattgtcgacattcacgatctttaccagcgaggcgccaagcgccgccatctctgtcggatgcagcggatccttctcgccctgggggccagaaggaatgtcgatcatcaacttatagccggcctggaggatgggggcgagggcggtggcgattttgggcgcatcccacgtgccgtctttgttgagccagcattgcgggctgccctgcgttaccatgccccagccgtgcaggcgaatcaggggcttttcgccgtccgttacagttttcagtgccgtcagcaaaattggattgtgggtccattccggatcgaaacacaccgggcaatccactccataggacagcgggtcgacc

SEQ ID NO: 192487 - DNA, 179 bp, Arabidopsis thaliana landsberg
atgacaggagaaagtactccagattttctcctgctcttagatgagactcatagaaaacctgatgggactttcatcgataaaaagtcggaggagatctataacgaagtgtcatcaaagattcaagaggaggagtctcacctgtgttcagacgacactacggagagcacaagttcaggcgg

SEQ ID NO: 192488 - DNA, 97 bp, Arabidopsis thaliana landsberg
aaagtcgcagagaatctggagattctttcagggcttgaagaaggaggagagacgatcgcgttttgcgagagatttgtgaaaggaagccaaagaacac

SEQ ID NO: 192489 - DNA, 494 bp, Arabidopsis thaliana landsberg
  unsure (1)..(494): unsure at all n locations
atgaaggcaaagaggagtggggcccagaaacctatggttgacgaccaaacccaatttcatgtgcgccacgtggaatactgcggtgtgcatgatctcagcatgaagtgtcatcatcactcctcgacgacctcgatccaatttcttccttcattgcattgtttttggtttgtagccaattttgtttttttggcgtaaactgtggactacattaacggtatagaaatttctaacgtagataataccctaaacactgaatatttcttggaaaccgatactaatatatttagtaaaaatgtttatatatgaagcataaatacaaaaatgataaggagatgtacttagaattaaaataacgaatttggttagtaattttatattattacagtatatttttgtatcggtttacttttaatcataaaacgatatcaaaaacgttattttcaaattttcaacaccgtttttttttcttttttatagntattctatatcgttaa

SEQ ID NO: 192490 - DNA, 1735 bp, Arabidopsis thaliana landsberg
tcatctagttgaacttggagttgaaccccagtactttggtcttcgttggttgagagttttgtttggaagagaatttttgcttcaggatctcttgttagtgtgggatgagataattttggcagataatagtgcaagaacggatgaggatagtagaaatcagaacttcaggatctttgattgtcctcggggaaccttagtcttgggaatgactgtttcaatgatattatatttaagatcttccttgctttctactgaaaatgcaacatgctgtctacaaagactattaaattttccagagaacattgacctgaataagataatacagaaggccaagttgttacaagctttggttttggatactgatatgttatcagctctgtcaattaatggtgttttcgaccagagcaattttgtacctgcaagaactaaaagttgctccacttcacctagatctcctttgattatcgctcctgaaagctattgggagaagaaatggagagttctacacaaagccgaggaagaagaaaataaaatttgtttggagaaacagactcctcctacacagaagaaaaagaggtggttgaatgtgacaaaacttttccgagcagtgattgatctatcacatcataagttaggaattggggaacggaaagcaaactcatctccagtgacacaaagtttgcttgaagattcgtctgagcagctcaatgttgattgtcatgtgactgtgaacaaggagaacattcatcctcaagaaactgaggaaaacattatggaattccattctgcagatgaagagagtatagtaagtggaagttcaccaagtgaggagagttcattcgtctccttagacccaaccagtcctgtcagatgttcaaccaaaattgaaaacgattcagatagcagtgctggctcaaatttgcttcccgatgaagagaattcatctgtctcctctgatccaatcagtcctgccatagattcaaattacagtggaaaatatttagattgctgtaccggttcggaaaacgataaagatcaacaaacaagtgtaaattcacctctttctgtatctccccataggagaaatgagtatccagtaactcagtctgatgaagacgtctccaccgataaatctgtgggcataactaaggagtacaagcttttacatggaatagttcagtggtttcggaagcttaaacgcactttgtcaagtgaggagacttctcatagaaaagcttctgatgccacaaagaccaatgatgttaaaattaaaaagaaccaaataggttgctattctgaatcccacccccaagctttgtcttctggagactcaagtcagaatctgaggaagactctgaagaaccttggccagcccatgctcaaacacattcaggtaacttctcagttctcatattcatcgtgtttcagcggttaccagcatttataaaaagataagtacaaagacagtaaaatgggttatcgaactggtaaatgtatctttcgtatggtcctgaaggtaactagtaagttagtttcttgcctccagtggtaaaggattattgtaacaaagatattttgccatttccatgacaattctttaccgccttacaagctcaaatgttctgatgattttagtctattttattttcaggcaattgagttggttttccaacaagaaccttgtctggttccggcaggattgatagggaacttagctaaaaccaatttgatctaa

SEQ ID NO: 192491 - DNA, 275 bp, Arabidopsis thaliana landsberg
atgaattctcttcatcgtgtagtaggattgatcagcagaacgacgactacatctccaatttctcatacccgtttcaatctcccatcgattctcgtcaatttgatgtccacaaaatctggaaacgatgaagacaaatggaacgacgcttgggaatcagcttggttaccagatgatctcacagataaaatccgagcaccatgggagagagatgtgaacttccctgtaaaagaatcaacggcgacggcgattgaagaaatcgatgtggaagcaaaagc

SEQ ID NO: 192492 - DNA, 97 bp, Arabidopsis thaliana landsberg
catctcgtcttctgattttcgtggatatcaccagacttgtatgtacactcgagctcgaatctccaaagccctaagaaaagtttttgatcttctttag

SEQ ID NO: 192493 - DNA, 802 bp, Arabidopsis thaliana landsberg
ataatcatgtcaaatctagctaagctcgatgtcgttacatttgatgtatcagacaaaaattatatgacatgggcatttgatgttaagatgcatataaaatcaaatgggcttcttatcaccatagatgcatctcaaacgacatcaaatgagagcaaaggtaaagccatggtattttatgccaccatctccacaacaatttaaaaaatgaatacatcacgagagaaggtatggcaatcactttaagatcgtttcgatcataaaaaatatgtgattgtcaaaatctaaacatgaatggctaaatctccggtttttggattacaaaagtgttggagattataattctgccatattcaaaatcacctccaagatgatattatgtggtgaaaaagtgagcgattatgatatgattgaaaaaacgctttccacctttcatcctgaaaatgtactccttcaacaacaatatcgggccaaaggatacactcattatttcgagttgatgcaagtcattttggttgctaagcaaaataatgaactcatgatgattaatcatttatctcgcccacctcgatcagctccacttttagaagtgaatgttgctacatccagtgatgataattggcgaggacccagaccttatcgaggccgtggtcgtggtcgtgggagagatcgtggtcatggccaaggaaaaggaagaagtttccattccaatgatttcaacgcggaaaaaaccaacaaaaataatgttggtcgtgttaagaaaaggcatgttgaaagcacttgccacggatgcggcatgaaatga

SEQ ID NO: 192494 - DNA, 546 bp, Arabidopsis thaliana landsberg
atgtgcatggacgttgtgataccatcactgcttcaccttcttgatgaaagggatggcgcggccaaagctgttagtgtcctgctggcagactattgttccaagtatgtctattctctttccttttggtactaaatcatgttagtagctttctagttaccagtgacggtacctagtttgtctctgacttaaagaaacattcaccagaaatgcaggtaatagctgtctcagtgaaattatacaacgccttgcttctggaactactgtgcaaaggctgaattctttggatgtgatatcagaagtaatccttatgtcaaaagattcatttccttctcatataccctggtatgcaatcatttatgtttttcgtcccaattttctatttctagcttttctgtatcttctttatttgcattctcatcccctcagaagtcagaatcattttctgctcttatttcaggaaagagattgcggactgcttgttaaagtgccttgatgacgaggaaacatgtatctgtaaacaaacttcagagttgctgaagtcaatcg

SEQ ID NO: 192495 - DNA, 79 bp, Arabidopsis thaliana landsberg
atatagtcggttcagggttgttgttcagtatattgtcatcgccaagttttcagatgaagatatacaggttgatcaaaag

SEQ ID NO: 192496 - DNA, 99 bp, Arabidopsis thaliana landsberg
atgtcgtttgaagcgtgcgcggtgttaagcgatctgacgtcggcaggctgtctgcgggcgtgcccgctgagggatctaccagtcgggattggtgtcagg

SEQ ID NO: 192497 - DNA, 202 bp, Arabidopsis thaliana landsberg
atgcccggagccaaattcgcggcctccatgggcaaggctccagcgcgcattgcgcttagctacgacaagttcggcgaggcgctccaaaccgataacacaagtgagtgcgataaagagccacactgttaccatgtaagccctaccaattccgaacagaagccagggcccatggataacatcacggcatggtccacaccttcag

SEQ ID NO: 192498 - DNA, 427 bp, Arabidopsis thaliana landsberg
atgggtgtgcaccaccggtgccaccgcggcgtcgaccgcggggatctcagaggaggccccagcgggaccttcggcggcgccgctcggggcgtgccagcagcgcggtgcacgcagatgcagctgcagtccgccggcgtcgtgacggaagtgcagcagctcgggatccaggtcgaccaccaccccgtgcccgagggccgcgcccagccagatcgaccacagccgggccgcgaatcccaggtggaacgtcgaggcggccacccggcggtgcggtgccgcgatgcgctcacccaccgcgtcgacgagcgcatcgagcaccgcggtgtcgcggtacaactgcgcgaccggccgccagccgtccccgtcgggctccccggtgtgcagcatgaagtacagactcacccgggcgagcgccggccacaccgggtcg

SEQ ID NO: 192499 - DNA, 471 bp, Arabidopsis thaliana landsberg
  unsure (1)..(471): unsure at all n locations
atgcgcaacttgaaccagtnnnnnnnnnnnnnnnnnnnnnnnnnnnnnnnnnnnnnnnnnatcgttctgtacgccgcagccgaaatgttggcagcgggcggcgcgaaagacgcgcagttgaagctggatcaggccaacgcgatttacacgaaactacgcggcaatctcacgccgcgcaagcagttccgcatgttcggtatcggcgagcctatgccgccacgccggatcgtgatctcgcagtaccgtcgcccgacctagtcaaaaacggagaccgtaggaaggtgcttatatcgctccccgcgtcggatggtgttaatggtgcttcggtttgtcccgtagtcctttgcgatggccgcgccggagcgtttatcagctcgtatagccaagatctgttcgtcggtgagagagcagttcccgtggcgcgtggtgcgagggcggcattttcgtctattgagcgcctgctcggatcgc

SEQ ID NO: 192500 - DNA, 147 bp, Arabidopsis thaliana landsberg
caaggtgtcgagatcgtcgtggaagtgacacccacgagcggcgtcgcgagtgatgggtctagcgatccatccctcaggcttctgctcctccgacagctccgtgctgtggctcgagctaccaccgacgtcatcatcgtctacgtcagg

SEQ ID NO: 192501 - DNA, 60 bp, Arabidopsis thaliana landsberg
tcagtcatcagcatcgagcagattgctggatccggcgaatgtgggaggcttgagccttag

SEQ ID NO: 192502 - DNA, 252 bp, Arabidopsis thaliana landsberg
atgatcgtagatttgctgatccaaattcgtatcgccaacgctctgggtaagtgaaaccaatcgaccaatttcttcgtttttgtttccttcgatctgtaacacttatcttctctgtgttactttagcgccccagttggttcgtctcagccgatggatccttccgccgcaccatacaacccacggtacactggtggtggtggaggatatggaccatctccaagtaatggccggtgataattccggctataatcg

SEQ ID NO: 192503 - DNA, 743 bp, Arabidopsis thaliana landsberg
tacgcggtgcagtttttcgaggagcaccgggtaccccgctgtagggtgaggatgaccttggagcctcatcctttgcagccaggctggcgtttgttggacttcgagtctttcggatactgggcggaagacactattgaggccattgctctccacggactgacgaccttttgtggctttcaccccttggagttgtccactcatcccattggcttgttacccacagaaaaggaggacaacccaatgtggaaggaccgagtagagcatgccaaggatgtgtgcgctatctacccagggtagactgctcacttgacggtgcggtgcatgaatgccctgtatcgtctgcaagtgatgcgtggagaggcaatgtcccatatgatggcattactggaggctaacaaaattaccttggataacagagaggaacttgtggtagacttgtccactgagatggtggaaaaggacttacaagtggagcaattgtcaaatgaaatccaagagcttgaggagttagtgggaacctggagaacaccatcgaggttctcgaggatcagctaatcaacactcagcagcagcttgcagaggctaaccagcatctagatatgcaccaccaggagatccaggacatggaggccaacgaggatgtcgacatcgagggaggagaggagcctgcctccagcttggacactgctggctcagggagaccaccttcccccgagtcgagtgttgcctcgttcgctcactag

SEQ ID NO: 192504 - DNA, 70 bp, Arabidopsis thaliana landsberg
atggttaagtcatatcttccacatttacacttttcaaagattgacaatgcttttactacattactgacag

SEQ ID NO: 192505 - DNA, 1715 bp, Arabidopsis thaliana landsberg
gaaccaggaatttgtaacgattatttagcagtatctgccaggggctgtacgatctcggccgtaggaggacgcctggattggatagaagtggctacttcttttttctcttttgaagatgaaaaaaaaactcaagagatcaactccagctcatctagcggctcctcgtttattctgaattttgttgatgttggtctaagctatgagccccaccatgagaatacagatcatttacgtcaagcaagtgatccatgggttgcctgtctggtagctgcatcttcttttagcctttcaaagaaaagtctggttgattccataagaaatgattatagaatcaggattcaagatcttgggcttcttctgtccgtggattttgaccttagcaagcttggtggaacgtacagttcagagcatcttcatgagtctggctatgttaaagttgctaatgattcgcttattgaagcaattctaaggactaactctgaaaatggccttctttgggagttagagtgttcaaaatctcacttagtaattgaaacttgcagtgacacgacttctggtttgattcgcttggccacccagctccaacagttacttgctcctgatttggaggaatcagctgtgcacttgcagactcgatgggacagcattcacaggcaaatgctaggaatgatttagaaatcagcgatagactcagtagctccgattcaagtggagaaatgaaatatttaagattagagtcagaaaatgaaactggggtcattggtttgatggacaaaataaatgaagatgcattccaatttgatgtcaatccgacatatcagtctgactctgtggaatgtcagaataactatatgtcacctcatggaatctctcatgggcaggcatataattgggtaccagctactgagaaactaccttctaatcaaagtatttgtgggtcgtcatccagaataaactcagaaagcagtcaagtattcctagaaagagagagcctgcctgaaatatttgaaaactattgtttgtctgagttccgtccatcgtcagaggtacctcaagaaggggattcgtcggggagagaattgtttcctgagactgatctgaggagaggaaattctgggtggtatgatgacgcgtccttaagaattgtagaagaccatgtgtcagaagcaactgaggaagatcatgaggaacacattctggatggagaatgttcatcttttggccagacgtcttattctgctgtagcagctaatggacgtatccttctgaaaaacattgacctcaaatggagaatttactctggctctgactggcatgattctagaaagaaaggtgaaaattttaaacatacaaagggccgggatacaacttcgtgccttgagctggaattatctggggtgcagttcctgtatgaaacctttccaattggcgaaatatgtacctctaaattatctctcatggtccaagatttttatctttatgatagaagcgacaatgcaccttggacattggtaattgaggtttttcactcttatcatcataagatagattatactagaagtaacctgggtaaataaattaacttgttcccttgaatgataggtccttggatattacaactcaaaagatcacccaagagactcctcttcgtatgcattcaagttggaattaaaagctgtcagacctgaccctgagacgccactcgaggaaaaccg

SEQ ID NO: 192506 - DNA, 712 bp, Arabidopsis thaliana landsberg
atggagaaggtttctgcagcttgcgccatggaatggagcatcaagctcgagaaatctcttcgttctaaaaactcaggtcctttcttccgcttttcaacttcatagttcttagaaatttcgaatttcagctcctcttgttgtttcacattttaagcaaacctctaaattgctttgctttacttatttggcgaatatatgttcttgttgtcttctctggaactatgaaagtataaagttttgagttttgggtgatattatttcagttaaagccgttgaagctatcttagagactggtgggaagcttgaacagtggagtaaagaaccagaatctgctattgctgtttacaatttatttggtttggttcctgaagaagataagctcttttcaaatactatcctgttgaggcttgttgacgcgttttgtgttggggataagcttattaagcttgctgttgttcgggtttttatgtctatgtttaagctaagccgagggaagaacgtaaatgaatcagcaagttggtttttgtcaaagggtagggtgcataaccacttggaattgcttacacgagtgaagaatgtgtatgataagggtgatactgagtctaaagctttggctttgattctgtttggttgttggagagattttgctagcgaatttgctcctgtacggtatttggttttcagcagtatggtttctcctcatgatctggag

SEQ ID NO: 192507 - DNA, 89 bp, Arabidopsis thaliana landsberg
gacaatttgaagaaatgaaatctgaatcggcctctgagagtccagtgtctcgtcggagaaacccagcaattgaattctgcgcttcctga

SEQ ID NO: 192508 - DNA, 62 bp, Arabidopsis thaliana landsberg
gttcgcccgcaccgagcctagacgcagatagctctcgaccgtccgctacagcgctgtcgaag

SEQ ID NO: 192509 - DNA, 263 bp, Arabidopsis thaliana landsberg
atgagcagttggagaagccttcttctgcgaattggggacaagagccccgaatatggaccctcctccgattacaaagatcacattgatacgtgctttggcgcccttcgtcgcgagctcgaccactcccaatccgagattctcgagttccttctcatgtgtgctgagcaattgcctcacaagattcctctgtatggtaccctgattggcttaattaacttggaaaatgaagactttgtgaaacaactagtggagaaaacttcaaa

SEQ ID NO: 192510 - DNA, 599 bp, Arabidopsis thaliana landsberg
acctcactgctccacaacactcttcctcgtcttcttcttcattgccttctttaaatttcaacaaattctcgaactctttccaaagattcccatctacaagcctaaatttctcttctacttcatcaacatcatcaaacccgtctactctcaacctacccgcgatttggggtaatgggtattcttcttatactccatatccttacaacaacgtccaatttgggacgtccaacctaggaaaaacagtccaaaatagccagtccttaaccgaaaccctaacaaaagcgcttacttccgacccaagtttccactcggtgatcgctgctgccatctcaactatggtcggatcaaatggagaacaacagattgtcggtccacggcattcgattagcaataacattcaacaaaccaacacgacgaataataacaaaggatgtggaggctattttagcagcttattgatgtctaacattatggcgagtaatcaaacgggtgcttctttggatcaaccatcgtcgcaacttcctcccttctctatgttcaagaattcttcttcttcgtcttctacgactaatttcgtgaacaaggaagagaaaagctag

SEQ ID NO: 192511 - DNA, 210 bp, Arabidopsis thaliana landsberg
aaagacaacagcgagagaaccacaaagcgcaacaaagagagtaaaaacaacgagagactaagcaaccaaacccgacgagaaacaggaagaggagacgccagcaacagccacgagaccaccacccaaaccaaacgctgcggacacggaaacagcaagcggcaaacaccggaaccgctaaaaaactgccgcggaaacgcaacagcaaaatga

SEQ ID NO: 192512 - DNA, 293 bp, Arabidopsis thaliana landsberg
cgtgggattgttctgcttgggttagaacatacgcgctctttctagaagagcggcttgaatgttatcgggttttaaagtatgacttcgaggcagagcgtttacctaaagcttcaggtgcagcttcaaaggtttgtctcctaacttctcatcatgaagttacagttctcattttcagaaacttttgttcaatatggtttttgtagacgcattgatcaaggatgttgtctggtgatgttttgttagatcagtttcctgcattgcaacagcttctttaccggcttatcggatgtcag

SEQ ID NO: 192513 - DNA, 203 bp, Arabidopsis thaliana landsberg
atgatctccggtaagcctcctcgttggagacggtgccgttgttgcaaatatatccgaggacgtcgattctagagattttcatggacattgacggagctagtaacgttaacggcaagacaacggccaaagaagagattaacgtcgatgccatgatgcagaggaacaatgctttgatgcccctttccataataaactattcttaa

SEQ ID NO: 192514 - DNA, 172 bp, Arabidopsis thaliana landsberg
gtggaccgacggtacaaccactactgcgaacaaatgcaaatggtagtgaactcattcgaccaagtaatgggttacggcgcggcggttccgtacacgacattagctcaaaaggcaatgtctaggcatttccggtgtttgaaagacgcggtagcggttcagcttaaacgcagct

SEQ ID NO: 192515 - DNA, 426 bp, Arabidopsis thaliana landsberg
gctactatttcgggtgccaaatctatgaaaggaactccctattggatggctccagaagttattcttcaaaccgggcatagcttgtaagcattacttcaaacatgtttgtaattgctaggttacatgctttgtcgccaatctaatattaccttggttattctatgcagttctgctgatatttggagtgtaggatgcacagtgattgaaatggtgactggaaaagctccttggagccagcaatataaagaggtacttaattttgtatgccttgttatctatgaataattctgtttcttgaacttctgtggatatatattcttttcagattgctgctattttccacattggaacgacgaaatcgcatcctccaatccctgacaatatctcctctgacgcaaatgattttttgctcaagtgtctgcagca

SEQ ID NO: 192516 - DNA, 204 bp, Arabidopsis thaliana landsberg
ttattgcaactaaagatcgaggaggctcgagaatctacaacaccaactccttatccggtaatctccatctgccttgacgataaaaaacccgagcgatgcgtagaaatcggcggagatctaggagaagaattaacacctgagctcaccgctttcctcagggaaaatgacaatacgttcgcctggtcccaagaagatttgctcgga

SEQ ID NO: 192517 - DNA, 284 bp, Arabidopsis thaliana landsberg
atggaagggaacaacaacaagtgggagaaaactgtttctctgggagacgagacaattctttggatttgggtatcacagtgctcgccaaggacatgcaagggatcaaggccaattccatctacttctccaatcctactccttattttaaagatcaatatgacgaaaacgaaatcttcatattcgacctcgattccaacaccgttgaacaaccgcaccgatctgtttcctcttcctttccccgctctagatcccgatggttcttgccatgtttcaaacgagaatga

SEQ ID NO: 192518 - DNA, 79 bp, Arabidopsis thaliana landsberg
atggcttataacatctctcttctacgcctcatcaagatttcatctgcagttgtgtcgtctctggcatccaccgtttcag

SEQ ID NO: 192519 - DNA, 822 bp, Arabidopsis thaliana landsberg
atggaggctggtgattttgttggagctcataaattcgttaccaaggcgcaaagactcttccccaatctcgaaaacatagtgcagatgatgaccatatgtgatgtgcattcttctgcaattaagaaaatcaaagggcttgacgattggtatggtgtccttcaggttcagccatatgctgatgctgacacaatcaagaagcaatacagaaagcttgcgctgcttctccatccagacaaaaacaagtttgctggagcagaggctgctttcaagttggttggggaagcaaacagattgctttctgatcagatcaaacgttctcagtatgataacagatacagatcccattcaatgtttgctaacaggcatgtgaatgtatactcgggtcgccactgtgcagctacaaacaatgctgcggagaatattgctggtgttttcacattctggacacgttgcaggcactgtggccagtgttataaatacttgagagaatatatgaacacttctatgcactgttccagttgccagaaatcttttgtcgcctgcaaaatgaggtgtgatggagtgccacctagtagttcaaccgctggtagaaaagaattccaagatcaagtgatgtctaatacatctcggcaaaatgcttctacagcatcagaatcaggcagctcagcagctgatatgggtaagaatgggaaagtcggagggaaagtcaacaagaagaatcaagaaaaacagaaaaatggtgctgttaacaggggaactaagaaagaagaaggtgtacagagaatgacgctgaaggaagaaaaccccagactagtgagacag

SEQ ID NO: 192520 - DNA, 116 bp, Arabidopsis thaliana landsberg
ctgcggctcggcttcttgatgaagaaaatgcattctcagctaccacaaccacccttggctcaggttcaggttccacggaattggttttggtgcaggaacagggtcaagtgggtcag

SEQ ID NO: 192521 - DNA, 55 bp, Arabidopsis thaliana landsberg
cgctttgaaagtcacggtggcattgatgattgacgacgacaatcacgaatcctga

SEQ ID NO: 192522 - DNA, 274 bp, Arabidopsis thaliana landsberg
acgcccatcgcgagatggacggtagccgtaccctcttcaacctcacgcgctcctgcgtctctttctctctcccatctcacttcattctctcgtctaccctcacgtcgccatggccctcggtcaccagcagcaacccaccggtgatacgccagcgctgtaccatcgagttggactaccctattcgtggaatagaagaacagagcaaaaatctaaaagaaaattttgaagtgcgacactccccaaccatgctggacgcagcccacggtggcgtttg

SEQ ID NO: 192523 - DNA, 133 bp, Arabidopsis thaliana landsberg
atgggaacccacctcgagcaaaggaagaaaggcatggatggagtgaacaagcagcaaaaagatgccaatgacaagaaaagaggtgagggcaacagtgagatatgttatgaggggcatcttgacgatggaaaag

SEQ ID NO: 192524 - DNA, 76 bp, Arabidopsis thaliana landsberg
atggcgttggcatatggaacagagtgtgaaagtcccattaaccagttgttcacttgtcggacatttcgaaccggtg

SEQ ID NO: 192525 - DNA, 35 bp, Arabidopsis thaliana landsberg
cttcgtcgtccggagcaagaaccgttgtggaatga

SEQ ID NO: 192526 - DNA, 891 bp, Arabidopsis thaliana landsberg
atgaacgtttatgagaactccaaccacagaataagattgatacgttacggcttcgcattaatccctcaaaggacacgcgtgagttcccctctaaacacaaatccatttcgtaccaaaactatcaaactctctctctttcccaacaaagcatataaactacacttatatgactcagtaagcattcatcaccaccactaaagtcttaaaggacaatgcaaagagagaaagaaagactactaaagcctaaaggtaaggaagagacagaaagaggaaaatggtggtcacacacaccaatcatcaccactcattcttgtttagcttttttctaaccttcttgtaatcatattcgaccccgaagttccccctactttttctataatattttgtagcatttacattacactatacatatattattcctattctgttcaaccatagtatcatatcatattcatatttacatctcacgaattagttgcttagatacgacgtcattttaatggaacggtcttaggttttaaatatgggctttgttagaggcccaatgattaacttttaagtaattaacttttcaccacacttaaaaaaaacaaaaggaaaacaaaacgtaagcaacaagagagaggcgatcatggttgaagaagagattatatgaagaaaaaagattgatacgttacggttttgcattaatccctcaagcgacacgcgtgcgtccccctcggccctctctctaaccacaaaaaccttatcataccaagtaccaacacacagtctctctcacctaacagagcatttacactacacttatgactcaacaagcattcatgaccaccactaaaatcttgaaggcaaggcagagagagaaagaaagactactaaaaaagccttacg

SEQ ID NO: 192527 - DNA, 103 bp, Arabidopsis thaliana landsberg
aaatttgcgtatagaagtaagtcgttaagtcccgtgaaagagaaagaggaaaagaagcaagaagaaaagaagaaagaagcggaggacaaagacgagaaggaag

SEQ ID NO: 192528 - DNA, 307 bp, Arabidopsis thaliana landsberg
atgctaacgtgcagcgcccgccctgaacctgcctacttcgcctccttcacaacctctccggcggatacacttagtctggttagtattatatgcgtaaacacatgttgaatgttgattcatgcgtagttatatattttcgtttgtaattttatgtttcattgtgtttcatcaggaaatgatagaatcaaaattacatgaggtggcgggagagagctgcgataaagaagacgacgaagattgcttggtgagaagaacattgacggctcatcttgattatatctacacacataagaataatcatcattaa

SEQ ID NO: 192529 - DNA, 36 bp, Arabidopsis thaliana landsberg
atggatggctttgctggagagcgtgtctcaatgagg

SEQ ID NO: 192530 - DNA, 366 bp, Arabidopsis thaliana landsberg
atgatgagaggaaaaccgggatacgagcacctaaatgaaccacttcatatcttagtggaagcagaattaccgattgaaatagtcgatgcacggctcatgcaagctcgggaaatacttgacgatcttcttactcctatggtttgtttttagctctccccctccctttgattttaaaccagttattgttacaaagttttcacactcggtttctgttttataggaggaaacccatgatatgtacaagaaacaacagctgcgcgagctagcattgctcaatggaactcttcgtgaagaaggatctccaatgtccggttctgtttctccttacaatagccttggtatgaagagagccaaaacaagagaagg

SEQ ID NO: 192531 - DNA, 406 bp, Arabidopsis thaliana landsberg
atggcgatggaaaccttgagagaacatgttatgttgctgtgttatacgaatgcttgtattaagtatggtcctgatggcgtatactatgaaggatctagtcctgaaaagatcagagttaagcgcaatactgagtttaacacactgttgaatgggctttatccaatttttggattagctaagcaaagatcaaagatttcaatctttggtaggtaccctgcagttctttcaccggatctgtttacgtatttacattttccggtggtgaacgactctagtttggagactatgcttgaggttccaagcaattatccttctattaaacttgtggagttgtatttggaagtgaaatcgacatctgaaggagttattgatcctgctgcttgttcatcgccattagaaaatcttg

SEQ ID NO: 192532 - DNA, 87 bp, Arabidopsis thaliana landsberg
cctgtaagcaagagcggccaagagatcggcgactgcagacggagagggcatcgaaaagatgagcagaatcaatcgccggcgatgtag

SEQ ID NO: 192533 - DNA, 467 bp, Arabidopsis thaliana landsberg
  unsure (1)..(467): unsure at all n locations
atggtaagtaacagatgcagactttgtccaaacaaacaggacttggatccgataaggtaaaaagaatttaccacacggaaacctacttatgagtttcaattactgtgttgatctgagtattcatatgttgtaaaatcctattttgtnnnnnnnnnnnnnnnnnnnnnnnnttctctttaaccttctctttgtgttccatgttatgtacaacctctttgctttttctatgtatagacacttttcttctacttccttcttttctgcatatcaaagatgaaacaaaacaaaaaaacgaaatggagttagaattcaaaagaaagtaactatttttgacaggagtttcaggttgttttcatggtcgaaattgcttacttttcatttatacatttatacacttgtttctatctgtctatagtgagcctgaaattttttgggttaatgttgttgatgactactatgacttatga

SEQ ID NO: 192534 - DNA, 1278 bp, Arabidopsis thaliana landsberg
  unsure (1)..(1278): unsure at all n locations
atggcgccccgcatgctccatgacgactgcggctctcagcccccttacggaagcaaggagacgtcagcaaggactcgacagccccaacagctatccttccgccaggctccaacgctcctccgacggccacgacaccacacgaaccgggtgccaaaacctctccggctgccacaatggcatgtacttagggcactagctcccctctgctagacacgttagcacactgctacaccccccccattgtacacctggatcctctccttacgcctataaaaggaaggtccagggccctcttacagagggttggccgcgcggggaaggacgggacggcgctcgcgtgagccgctcgctccctcccgcgtggacgcttgtaaccccctactgcaagcgcacccgacctgtgcgcgggataagcacgaaggtcgcgggtttccccttttttgcctgtctcccttcttccccacttgtgctccgtctcgcgccgacccatctgggctaggacatgcggtacaatttactcgtcggtccagggaacccccggggtctaaacgccgacagttggcgcgccaggtaggggcctgctgcgtgttgacgaacagcttcccgtcaagctccagatgggcagtctccaacaacctctccaacccgggacggttctccgtttcgggagtcttgagttcatgtccctcgacggcggctacgacatgatactccttccaccgccgcgcgacgacgacaatggcggccgacaacccgcccgccggcgcggaatcgacgacgtcttccccgcgtggtggaagaacgaccttcgagctcatcctgccctttcccctgccgatggaggggaaggcagggcgaccaaggccaagcaggaggcagcgcctcgttggctgttgagcgagccgacagcaccggcaccccaacgaggggcgcaccgggtatcaacttcgcgcctgagtcgaagagangcgccgtctccccgcgacacgcccatcccgagcaagcggacgacgccagcgcgctcgcgaaaggcttgctggatgtcgccctcgtacctgagacgacggtgcagtcagtccccgacgtgacttcatcaacgcccgtcgaccaagaggtacggaccgattcccatcccacgcctttcggattcagcctcgacccgcctagcggctccgctttggcggacgctctcgcagaggcgaatccgaaccctctggggtttcgtatgcggtcaccttgggaccggctgacggacgtctcgacctacgggccctctag

SEQ ID NO: 192535 - DNA, 301 bp, Arabidopsis thaliana landsberg
agccgatccgcctggcgtggcatccagccagacatcgaggaaaaacttggcatcgcccagatagtcatcgaggctgggcgaattggcatcccagcagccgaacaccaggcccttatactcggccactttcgtcaccgggatcaggccgaacttggtgcggtcgagttcgccgaaataggcctcggtttccagcggcaccccggagagcgcgccggacggggaaaaagaccagacgtgatagctgcaggcgaaagcgcgcgcattgccgcgatcggcgcggcagatccggatgccgcgatgg

SEQ ID NO: 192536 - DNA, 1038 bp, Arabidopsis thaliana landsberg
tcctcgacggcttctgtagcagcatcagccaaatttcatgtgaagttccctccaaacaatatgcgcatcggtcataatagtgatcgacgatatttttcatatggttacacctctggtttgatctatttatatggtgattcgtccgacgatagatctgtgatatgtaacccctacacaggagagtatgcaatcttaccttatttgcaacgttacagaaagacgtatagctttttggtgtttgaaccgattgagaagcaattcaagatattgttcatggcttatctatctggtgatcgtgatcataaaatccttacagtaggaactggaaatatgaagtggagaaccataagatgttccttgagatatgaaattgtgagtgaaggggtatccattaatggggtattgtattacttaggcgaaacgtccgcttgggataataaagattatgatttaaagtatgattatgcgatagtttgctttgatattaggtctgaaaaattcattttttttgagatagaaaggttttgtagattgataaactataagggtaaattagcggtaatttatttcgaggatgatgtcatctatcaatcgtgtctttatcgtaagaagaattatgtagaacctgatgccattaataagttgaatgtgtgggttctagaggatgtagagaaacaggaatggtagaaatatgcctacacttggaccgatgatatattctttcgtcgtcgtgaggtttccgttgctccaacgactgctgcttggggtgacatagtcttttcgatgtgtgagtatactcctggacaaccattttatgttttctacttcaatcctgaaaagagcactctccaacgtgttgaaatccaaggttttggtgaaggcgtttgtagcgtttacacctttgtagacgacgtagaagatcttaatgttaaggatttaaaaatactcaagccatccaatgctccatttgagaagacagaagattcagaatatgaagaagaatatgaagaagaagatggagacgatggttggtcttag

SEQ ID NO: 192537 - DNA, 359 bp, Arabidopsis thaliana landsberg
atgatcggaaagttgtggagatctgtgggaaccgtcggaaagtttgatggtcgttacgacggcgtgagcacgatggttggaaaagcctcgaaccgagctggtgttcatggttcgaaacttcccaacgctaaagcacttgacaatgtaaccaattagttgaggtttcataatctcatttttgtttgtttgtcatagtaatcatgaaattaaattattctaatgcgtaggaggaagagatcagggagaggattagtaaaggcagcgaagacaaagaacagaaaagaaaagaggttgagaaaaaagttgaaggctctcaaagaggatctaacggcgaagatgcaccatcctcccaccggtga

SEQ ID NO: 192538 - DNA, 12 bp, Arabidopsis thaliana landsberg
atggcagaaatg

SEQ ID NO: 192539 - DNA, 1059 bp, Arabidopsis thaliana landsberg
ctccacctggaacaaaagtctcctcaccgtatttccaggcgcctacaggtaactccattaacccttaagatttcctgttatcgatataatcatttttttcccgaagctgacatgttcctagatttcctgttatccacatgtttctctcttcttcacaggaaaagaaagagaaaaggagaagaatatgaatcatatttaacctaaattgtttatctgtttttttggctttttccgtttttttttttttgtttttttttttgtttttctccgtattttttttagttacgtttttatttttttcccacttttccaacaaaaaattagtttttaacaaatattttgttaataatttccaacaacttaataattattgctaatttgcaacaatatcatatttgttggaaaatttcaacaatattcctacgacgtttgtgacaaatttatcataaccaaaatgtattggaaatttgtcaataaaataaaatatttgttgcaattttatagaatatctgttagaaattttcaacaaaatactattattggaagcatctgttggaatatcacatgttttcttgtagtgatcataacaatgtttatcttcttcatcatctcctttctcctttcctttctctgattcttctgttcttattctctatttcttctaaatctcattctctttcttttacttaacttaatagcgcattttgggtcttatcagaacctttgaagcgtgttgaattgttgtctctttatagtagcatgaatcaaagtatcctatatagaaaacaataaaacttgtgttaataagcatatttgtcgatgataatttcaagactataaagagtttaagatcaagtgaaaatcgattgtttgcttacatctgtatcagctaggatcatttctattgttttcctagtgtattgcaagaggattgtatgcttacatctgtatcagctaggatctgtcttgaaagacttcaattcagcaagagcggtgaaggttatttgtggtgccatctctcaaaataaacaggaagagaaacgtctattttctaaaagg

SEQ ID NO: 192540 - DNA, 487 bp, Arabidopsis thaliana landsberg
atgggcaggtgggtcatgtcacgtgacaacaagggacccgaaaacactcgacccggccgtgcgttttattttgtttcctcacgcgccgacatcttatcattgccaaccacgcgccttcatcattttcgcttcgttgtaatcattatacgcatgatttcaaatgaaataactccttctcattaatgatctaactgtactcgaaattaaaaatagttaaacatagtacattcgaattatatggcgtatataatgaactaataattcatctttttagtaagtaattttgttttcaaactagtagtttattatgcgttctaaacgaaaacatgaaatatctatttagaagctctgtttgaaaatgttactggatttgaatactcacgacaaaacgaacaaaaaaattgttattgaatatatatatttctacttcgttttttgaatagaagaaattcgagacccaaaagctcgtagatcccccttaggttga

SEQ ID NO: 192541 - DNA, 1701 bp, Arabidopsis thaliana landsberg
aactaagaacgaatccggaagcgttacgtgtgatgcccgtagacgatctgaccgagttcccagaacacatccggtaccaaggtcagttcatccgtgaacatcgttcctctcgaacatggcctaaggcttttcaacccgtaccatgtccgtaagttgtgttagtcaggacaagactaatattagagatacacaaggatttctaaaaaactcattttattaatcttaaaatatctcaaaatacaattgtgttcggctagccaaggcctaatgccacaatcaagtcatacaacatatatttttaaaaaaatatctttacaaaggcaacgaactctacaccggcttccttacgttcgtgctcccctctaaggtttctcactatggttacctgcaaaatagagtgagggatgagcaccaatcgcttagtgagtccaggctcccctaaacatgcaatattccccacccagaaacccaaaataataatcaaatgcatgcaatcaacaaacaatcatgcatcagacaatcaatgcaagattcgaatatactcgattgagtatacttgacaagaaatcaaccaattactcttggaaaagtgtaatgaacccaatcaatattaagcatgcatgcataactacactaaccgagcttacgcagcggaaccacttatactactctaaagcctttctcttttcagcgatttttatttcccacaaggcaatgtctctaacccttagccacaaatgctagaaggatcacatcccttcccccttactgtctacaagggaccaaatcccttacggtataatttgtactaccccatcgggccgcctcgggtggtagcgagccagtccgagccgttgggacaatcatgacatcgcttccgaactagtcataaaaatgactaatcacgtttacttactacgaccctattgaatctcaataccactcgtaataagatctacctcacaaccaaatgtctcaattactacctagcatgcaaagccaattacaaataagttaacaaagcaagtgcgagattaaccaacaacaatcaatcaatgataacaaacaagcaatcaatcaatactactctatcatgtcaataactaactacttattgaccacccgacaacgggtaacataatagttatactaacaacataacatgtattgcgaggtcatccagagcataacgtttacactaacgtctagcccaacctcacatctaacgctataaataaaatgtttataatttgtcgggatccctcggttaaccttgcaatcataaacgttaccagaatagtttagcatttgcccacacagacacaatgcaacctcctaggcgtctctcacaacattgtataactacttaagcaagtagttaaaactaaaagcaatccttcatagatctattcctatattctacacttagctaatagaaccaatctaaaagctaaactatgcaacctaatcaatcaacaattctagatctatgaacggaaagtaaacaaacaacaatcaatctggttcacacgagttctatgaactacatgtaaacacatgcaacacacataacctagactcaccttggcttggatgaccaggaaaattctacccttgaccgcctatatctcgatccgacttaagctttctccaatgcgtactaacgatggatctaagccgcggaccgaaaataaaacttag

SEQ ID NO: 192542 - DNA, 1380 bp, Arabidopsis thaliana landsberg
agaaagagagatagatggtgatcttcgagctcaagagttgcggcggcgagtcggcagctctcggcgacggctagggtttgcttttgatgaaggcacacctagggttagggcttataacaagtatttgtacttgagggccaagaattaggtttagaggtaaaaacgtcaatccgccggataagtaagtgatagggccagtcgtgggcatcagggaaggagccaaatgacggtggcacaatgaggaattgacttgggcttgacctaatggtcggtggaaagcttctcggagctgcccgggttcaagtctccttggccggatgctttttggatttattatttccaaacgaccggttcttgacatgtcctcactctttgggtcatatcttgcaaacggcttcatggattgcttcgatttgacttcgacgttaatcttgactcttctagctttccatgcatacctacatatctcgtttccgtgatggggaagaactcggccgtatgctaaacttctgaagtactggaactgatcgctttttgatagttttaggttcaaaactcataaaaccttcttggcacctagaatacgtgtttctcctcttcttggatcaagaaaggcaccaaattctctttgaaacataacaaaacaatagctaaaacgggctaaaaagtcgtgttatcatcatgtctttggaaatccgacgaactataattggaaaaccgacaaacatttccgaccatttatttaccgtcggaaagtctgtcaaaaaaggctttgttctcttgtattttatcatattcaaatacaatctgaaagcttttgctgtttagaaatgaacacgaaatcagattcttacgaatcacatacacatggaacacgttcatgagtgtgaattttttcccatatgtgagttttaaaaccatttttcctttccttttaatcgtcgtggtgctcatgtttcccatgataagtttttctcattagaaccttgtttgtacgttgagaacatactcccgtaagagcacacatgcttcgtgtcaacccaccaatcattagagtttgtcatcatttttgcctctgaatcgaccgcaacaaactgattttgacaaggtttgtgttacatgcatctccaacaatgtcctttccgtcttatggcggtagtccttggctgtatgttcaggctttccatacatccaacaacatcttatggcttcttcttgctgttaaaaccctttggtgaaatgaacggtttcttaccgttattgttcttcttgaagaccttgaatatggacttgtttccttcaattacattggctttgattccatagaacaaaactcagaattctcattcttacgattttcctcttcgattcgaagattga

SEQ ID NO: 192543 - DNA, 714 bp, Arabidopsis thaliana landsberg
atgcatatgggagatgacattagcaaacacaaaggtcgaagacctttcaaatttgttaatgtcctcactgatatggcagaatttctaccgacggttgataatttttggaaagatacagaggatttgtttctatctacttccactttgtttcggttttccaaaaaactaaaaggacttaagccaaaactccgggatttggctagagatcgcttagggaacttggtgaagaagacaaaggaagcttatgacactctttgtcaaaaacagcaaacgaacttgttgaatccaaccccagacacaatggcagaagagacagaagcatacaacaaatgggaatttgtcgcagggctagaggagaagtacctcaaacagaaatctaaactacactggttaaatgtgacggcaacaataaacagtttcgtagggctgctgcaatcagggaaattcagaatagtataaaggaaatacactgccaagatggaagagttctagtgaaggaagatgatataaaaacagaggctgcacgttatttccaagatttcttgcaatatgtccctactgactttgaaggtaccacaattgatgggttgcagagtttattaccatatcggtgttcaaactcagaccaacagaagctcactaaaaacgtcacgggtgatgaaataaaacgggttctatttgctatgcctaacgacaaatctccgggaccagatg

SEQ ID NO: 192544 - DNA, 342 bp, Arabidopsis thaliana landsberg
gtggtgggaaaaatggatctaaaggttttgagaagagggttacatcaactttcttcattaggaaaaagaaaaacacaacaagtgatccaaaattacttcttcctcgatcgaaatcaaccggtgctaactatgaatccatgaggctacctcaggggaaaaaggctcttccagatgttgttacaacaaaagacacaatgagaaccaaatctggacgtgtttcgtcacaaccaagacgtgaaaagattgatgaatccggtgaacagtttatgaaggtgagatgttttgatgacagtgactccatttggttatctatagattgagcgtcttcgacgtctattttaa

SEQ ID NO: 192545 - DNA, 223 bp, Arabidopsis thaliana landsberg
atggttgaacaagtaactccaaaattgggaagtgtgatactactcaacttctttgatgttttaagacaatggaatcagaaactattgaaagagaaaaggtaaagagaaacaaaactgataaattcataataagcaatgtgagatccataacataagaaatatttttgaagaaaagaatctccgacaaaatcatataaaagataaaaagacgcttcttctacag

SEQ ID NO: 192546 - DNA, 586 bp, Arabidopsis thaliana landsberg
tttgccgacggattatatcgaaaccgtgccgccgggtgacgcggttactttcaacgatctagacagtggcacggtgttgttgagcaacacggtcagtccggccaaggtcaccattaacaactcgtcggtcgcttacacttttcagggcaccggacagatcaattccgtgggcggattaaccaaagttggagccgccacggtgacgctgaatgtgcccggcacattcgccggcaacaccgttatttccaacgggacgttgaacattggcgccagccagacgtttgcgaatttgtccggcaacagtccgatcaatgtttccgccggcgcgccgacgctcacagtcaacgacacctcggacaccgcgttcgccggcaatgttaccggcgcactgggtctgaccaagacgggagctggcgtcctgacgatgactggcagcaacgccttttctggaaacctgtttgtgagtctcggcgcgctaacgcttgattccggatttattaatcttaacaactattgcagcatcggtcacggtggcactgacaatggcacgatgactttgaaagagaacggcgaatttcactggtaa

SEQ ID NO: 192547 - DNA, 126 bp, Arabidopsis thaliana landsberg
atggatatgttgacgcaaactatgagcttggtttcacgacctcatatcgttattactactcctggaagaatcaaggttttgcttgaaaacaatcctgatgttcctccagttttctctagaaccaag

SEQ ID NO: 192548 - DNA, 221 bp, Arabidopsis thaliana landsberg
gcccgggactggctggacaaaagaaccgcccggtcgctggccgcgatcggctgcaggccttgggagccaaggtgaccgggtcagtttccaagaagaccgactgcctggtttacggggaagatgccggcagcaaactggccaaggcagaagccctggatattccgcgcttaacggagacagaagcaatcactaagatcgaagagaaggacacggaaaagtga

SEQ ID NO: 192549 - DNA, 226 bp, Arabidopsis thaliana landsberg
atgatctctgaatcggaacaacggtgcttaagattttgttctcggttttacgcggagaggcttaaggggtaaaagcggtatatcatataaaaagtggttgtgaatttgccacgtcacctcaagtattgaaaggtgttatacggaaaaagaaaagaatctaccggtgcgcgaattcagaatttgccacgtcacctcaagtacgacatcatgggccattactggttga

SEQ ID NO: 192550 - DNA, 84 bp, Arabidopsis thaliana landsberg
atgagtatttttcagtacggaattaagtcgtcggaaaatattctacccgatcgccaagaagtaaagtggtcccactacaagaaa

SEQ ID NO: 192551 - DNA, 421 bp, Arabidopsis thaliana landsberg
atggcttcgccaagggccgccgaatcgtccaccggcaccagcagccccgttttgtcgggttcgatcaactcgacaggcccagcggcagcgcaggcaaccaccggcttgcgtgcggcccaggcctcgatgatcgtgttgcccagcggctcgcgccgcgacgagcacaccagcatatcggccgccgcgagcagggcgccgacatcctggcgccagccgaggaagcgcacgcgatcctcgatgccaagcgataccgcctgccgccgcaacgccgcgcccaacgcgccctcgcccgcgagccacagataaagccccggcactttcgccaccgcggcaagcagcgtgtcgaagcccttattcggatgcagccggccgagcgcgatggcgagcggcgcatcggcgggcgtgtcgagcgtggcgcgcg

SEQ ID NO: 192552 - DNA, 162 bp, Arabidopsis thaliana landsberg
gaaagctggagattctcgcagaacgtaagaaattttctcgcgttttccctcggaatattctctcctggtttttttttgtttttgccttgtttgatgcttcgtctctctctccctcgtttctggaaaaaggaagagaacagagaatccacgtaggcgtgtcag

SEQ ID NO: 192553 - DNA, 62 bp, Arabidopsis thaliana landsberg
atggttcaagaagaacctatgaaactgagaatcaccgaagttgttgacattgaaagaaggtg

SEQ ID NO: 192554 - DNA, 132 bp, Arabidopsis thaliana landsberg
atggctgaacgagagataatggaccaagtgtcacggtctagaccccacgtgcttgagggtgggagcaacgcgctgttccaaagcttgtctgtggtgaacacgcgtacctctctgaatcctcgtgatcttacg

SEQ ID NO: 192555 - DNA, 389 bp, Arabidopsis thaliana landsberg
  unsure (1)..(389): unsure at all n locations
atggacgacgaacaaaaaatattcgacaagaaatctatttgtggccacaccccaaccagggccaccacccacgaccaggccaccacttcgccatcgccacggctccacccacgtctcggcttttgcttgcttgcttcctcctctnnnnnnnnnnnnnnnnnnnnnnnnnnnnnnnnnnnnnnnnnnnnnnnnnnnncgggatcgcgccccccatctgacgccaccggcgccggagccacacggcgaccgcgcgcctcatgctccgatctaaaaggtgcgccttcttaccgagattcggcgagcttcagtagcaaggaacgagggacatcggggcagtggttagattggcttgcctgggagggatcggagctggacctgcattttgcgtg

SEQ ID NO: 192556 - DNA, 162 bp, Arabidopsis thaliana landsberg
aaagcagatcctgaactttatcaaacgcaaaaacctgaagaaacgacttaataaggatggaataagtgtgcacatccggctgacagttatgactacttttcatacgttccagaagagtaaacgcagcatcaaagcgtccactcctactataagcagatacaa

SEQ ID NO: 192557 - DNA, 65 bp, Arabidopsis thaliana landsberg
acttcacgagttttcattggtcagaagaatcagccgttaacgacggaaccgaaaccggtttataa

SEQ ID NO: 192558 - DNA, 52 bp, Arabidopsis thaliana landsberg
atgcgttacaacgtcgtggtttcgttggtgcatgacaaaaatttcaaagtag

SEQ ID NO: 192559 - DNA, 53 bp, Arabidopsis thaliana landsberg
gatactgagaggacacaagcaatccgtagaagaagagggagacgacttacaag

SEQ ID NO: 192560 - DNA, 654 bp, Arabidopsis thaliana landsberg
acgtttgaacaagggtggaaacaaacctccacgtgttcgacgcgccctggcatcgccagagcacgccccggcgctcagccccgcgtgcaccgcgccaagccaaacccgtgcccccgtcgcgcccacgcctataaagccagccaaggcttcgaccgtacgcccccgttcgctctcaacctcgccggagcgccagttcacaggcgattgctctgcgcaaggcgtgccagcggccacccgaaaaccgaccaccgtagactggccatcctagccattccccgccccgtccgaccctcgagagagtctccacgtgtctcagtgaagctcctagagccgggaatcgagctctgcctcgccggagacaccagatcagcgtcgccggacttcactagatcatcggcgcacgtagaccgagctccacggtgagtcttttctcgattccttgctcgggtcaacttattagcaccccgtgaagctccctatgcccttggattgaaccctaccaccgtgagcaggccggagcacacgccgccgacgagcccgaccgtctgcgcacgcggccaaccctattccggccatcaccgccgacgatccgcccctcgacgtgaccgctaggacctcccggacctcagccagccctccaccggaccgctgccg

SEQ ID NO: 192561 - DNA, 34 bp, Arabidopsis thaliana landsberg
atgttggatatcaatctatttcgtgaagagaaag

SEQ ID NO: 192562 - DNA, 81 bp, Arabidopsis thaliana landsberg
ctgcgctttcagtgggatcaacacacgtcaagtattaaatagtgacttcacgcagttcaccaaggacttgatctttggaag

SEQ ID NO: 192563 - DNA, 668 bp, Arabidopsis thaliana landsberg
atggctttcgctttgaggttcttcacatgccttgttttaacggtgtgcatagttgcatcagtcgatgctgcaatctcatgtggcacagtggcaggtagcttggctccatgtgcgacctacctatcaaaaggtgggttggtgccaccttcatgttgtgcaggagtcaaaactttgaacagtatggctaaaaccacaccagaccgccaacaagcttgcagatgcatccagcccactgcgaagagcattcctggtctcaacccaagtctagcctctggccttcctggaaagtgcggtgttagcattccatatcccatctccatgagcactaactgcaacaagtaagtatttagttttgttttacttgatctagagaccatgaattattttttctaatgacaaaatgtgttctcttgatcgtttggattgttgcagcatcaagtgaagtggaagcttacgtcgtcgttttggcgttaagagtatggtttaccagaagtactagaataaaatacggctatatatcttagctgatattaccatgtatttgtttttgtctcaatgctttgtcttattttcatatcatatgttgtattgatgtgctaaaactatgataatagtaccttattagtcatcttctttctagatatctcctccaacgcatacgaacgtaa

SEQ ID NO: 192564 - DNA, 616 bp, Arabidopsis thaliana landsberg
acggctcgggtgttgtctccgtcgagctctccaagaagattgtggaggagccgcggtgtcgattgtgaggggttcgcgcctacctcgccggagcggcaaaggtgacattatggaaatgaggtattgagtgatttcttgtccacttggctcaaagatcaagccgtgtcttgatagaggagcaagtgagagcttgaagtccacctcaacgtggattaggggtgatcggcaaatcaccgataccacaggataaaatctggtgtctttattttcttgcattacttattgacgtgcaagtgattagtattttgcatattgttcttcaagtatccaatcaccttagttgattctcatagattgtttacttgttatcactagagaatttatacctcttgtcatattgattaaatttctctagtgttttttattttagtcaaaactgtctattcacccccccctctagccatatagcgcaaccctttcagccatacgaccctatccccgccgcgcttcgcctctcgtgcccgccacatcgtcgtcctcttccatctcccagcgacctccagcctgtcgttccttgtgtcgtcttcctcacgttgggcacggcagcgagcggcag

SEQ ID NO: 192565 - DNA, 513 bp, Arabidopsis thaliana landsberg
acgataaatatccccttcctcaatcgaaacaaactatccagatctcaactttctctcatcttcaaattaaaatcaaacagtttcttaataacattttacttcatggctcgtaccaagcagacggctaggaaatcaaccggaggaaaggctccaaggaagcagctggcgacaaaagcggcgaggaaatctgctccggccaccggaggagtgaagaagccacacagattcagacccggaactgttgctttaagagaaatcaggaagtatcagaagagcactgagcttctgatccgtaagcttcctttccagcgtctggttcgtgagatagctcaggatttcaagacggatctgaggtttcagagcagtgctgttgctgctttacaagaggctgctgaggcttaccttgttggtttgtttgaagacactaacctttgcgccattcacgctaagagggtcaccatcatgcctaaggatatccagctcgcgaggagaatcagaggagaaagagcttaa

SEQ ID NO: 192566 - DNA, 96 bp, Arabidopsis thaliana landsberg
gatgagaaagtcatcgcctttcaaggcatcgaacctgcagcccagaggtttgtgtctctgttcgctcgctttgctctatcgagttttgtgaattga

SEQ ID NO: 192567 - DNA, 148 bp, Arabidopsis thaliana landsberg
ttaactccaaaagaagcctttcgactactctcgcacaaattccacgggaaggggcctggaaaaatgaaggaagagaaacggatgaaacagtaccaggaagagctcaagttaaagcaaatgaaaaactcagacacaccatcgcagtctg

SEQ ID NO: 192568 - DNA, 323 bp, Arabidopsis thaliana landsberg
atgaaaccaatgcgagagcctgagtcacaagcaggtcactatactaacaagactgtttctaaacaaccaccaaatactaagaagttgtcgcagcaagaaatgagtgaaagcgagctatgggactttgctatttttgtgatgaaaagtacactctggagcactatttggttcacaagaacgcaactgttttgtatggatgtagatgatgagtttgaggatgcgagtgaggaattgttgaatgaggatgaggagaacatgcctcagatttttgtgaatgcagtttcaggaatatcagattacacgactatgagagttaagggaat

SEQ ID NO: 192569 - DNA, 83 bp, Arabidopsis thaliana landsberg
acaaaagcattcctcacttagacaaaatagacaaaacacttcgtcgacgataccataaatttcgtttcgggtcactgatatag

SEQ ID NO: 192570 - DNA, 136 bp, Arabidopsis thaliana landsberg
tttcaatcaagggtacaattcctacatttacattctggacatcttcatgacttcatcaatgttaggagtacgcggattcacctttgaaaaagatcatctatctagtgaaagaaagaaagctgatatacatgtatag

SEQ ID NO: 192571 - DNA, 103 bp, Arabidopsis thaliana landsberg
atgaaaacctggagctttaaaacgacaatggttgatgctagggccgaagtaggggccttgggaagaacaagaactcgaaattcggaggaaccaaagttttatt

SEQ ID NO: 192572 - DNA, 322 bp, Arabidopsis thaliana landsberg
atgccggagagaaggcgaaaaggaagggttgggggtatagaatggatggaagctgtgttatggtttttgaagatgcaaattccaatcaaccagctgatggcgatcaggacgctgttgggattcaggaagctacatcaaatcacatcagacgcttgagttgttgacatggatgcaagagcagacgtggcaagctgagacgaattttgtggagagccaaggagggaagctgacgtggcgcggtatcgaagacaagatacatcgagaagatatggaagatatcatctcaaagaataaggctttgaaaacaagaaagattccttaa

SEQ ID NO: 192573 - DNA, 158 bp, Arabidopsis thaliana landsberg
acctcaagcagaatcaagaagttgatttccagtacattcgctcaagaaacaatgtagcagaaaggctcttccagctacaacattcagaaaggttcttcacatattcacatatcaaaatgcatcttttgaagaagatgcttctagagggagacatatga

SEQ ID NO: 192574 - DNA, 153 bp, Arabidopsis thaliana landsberg
atgcactctctacgagtccaaaaaaggtgtgctaattcatatatggccattaaaactgatataagtaaagcatatgatcggattgaatggaattttctggagggtgtactacgaaaaaagggttttgcgtcacagttgataaagtggataatg

SEQ ID NO: 192575 - DNA, 298 bp, Arabidopsis thaliana landsberg
atgtcacagggcccgcggtgcgtatggcgaaccccccgcgtgcctctggggagccaccaccgcacctctgggaatccattgatgccatgccttcagatcggggagcctctacgcctccggatcaaggaactgtcgtcatcatgcaaccggatcggggagccgccatcgttgcgccttctgatcgaggaaccgccattgtcgcgccgctgggaccggccgtcgccgtgcctccggatcagggagccgctgtcgttgcgcttttggatcgaagagccgccgcagtcgcgccttcaaatcg

SEQ ID NO: 192576 - DNA, 198 bp, Arabidopsis thaliana landsberg
ccatgtgattttgtgaacatcacatatagaccgttggatctgttgtcatccgtatcatcacatcggaaccgtttaatttttatgattgtgaaacgacgacgtaaagttgttaaccgggaaagacgaagaaaaacgcgcgggaaaattgagagactgcatcttaatcatcgtagggattctctattttttggaatctga

SEQ ID NO: 192577 - DNA, 98 bp, Arabidopsis thaliana landsberg
ttgaactgtaccgcactgaaataacgctttccccatacaacaaaaatcgcggttatcattcggaccatagtctcatcatgggcttcttgaaccattga

SEQ ID NO: 192578 - DNA, 136 bp, Arabidopsis thaliana landsberg
agtttaccaagctcgacgacgttcaacgaaagcaaaaaaccgaatggcaaaagacaccggtggtccccggcacgcagcagcaatgcgctgctccgtgctattcgctggggacgacacactcacttggttgaagctg

SEQ ID NO: 192579 - DNA, 163 bp, Arabidopsis thaliana landsberg
atgtttgattctggtttcagccacaatggaatctgggagagtaagtttcttaaccattttgcctctctcccaggagctgctaatgctacaaattccaattccatagttgaatttgtaatacaagtttgtttctttgatgcccatgaaatgacacctcccccaa

SEQ ID NO: 192580 - DNA, 132 bp, Arabidopsis thaliana landsberg
atcgccgtactgcaagagcaggcggcgaccgccgcgcaggcgctcgaagacgccaacaagaagctgtacgattacaaaagcagcgtgggcatcacctcgatcgacgaagagctgacgctgctgttgaattag

SEQ ID NO: 192581 - DNA, 675 bp, Arabidopsis thaliana landsberg
atgaagaccatgctgcagcagataattcaaggccaagccacaggagcaatggaaatcgttaagaagtttggtgaattacacaacaaagttgaccgacacttcgtcaaacttaacagcaagtacgaatccttgagcaccaggatacgatatctgaaagacatctccacttcaccatctgttaccaacaacccaggccagcttccagggaaagcaattcaaaaacctaaggagtatgccaccgctcacgccatcactatctaccatgatcgagagctgccaactcgacatgcctctacctctatcactagggacagtgaagttcaagaaggggaggttttcgttcagaatgaagttatagctgaaatagcaatagaggagcccatactcgattgcagtaatcgatcccaagctcaggtagtacctccttctcttaaaaagcatgccgctactaaaaccaaggataaagtctttgttcctccaccctacaagcctccactaccatttccagggagattcaaaaagcaactgataaagaagtatgaagctctcttggaaaaacaattgaaggaccttgaaatcacaatgcctcttgtagactgtcttgcgctaataccggactcaaacaagtatgtgaaggacatgatcacagagaggatcaaagaagttcaaggaacg

SEQ ID NO: 192582 - DNA, 110 bp, Arabidopsis thaliana landsberg
atctaattcgatctatccaatctattcgcgaagtgatatcttcatcacctacttttactcgaaaatttggagcaaagatcagacaacatcaagatgaatgtcgtcaatga

SEQ ID NO: 192583 - DNA, 113 bp, Arabidopsis thaliana landsberg
acgactcaaaacccacattaaaacagaatgacacactgaacacaacaaccaaagacccaatgggaatagcaaaaccctataatatacacacacgcacgcacgagaacgactga

SEQ ID NO: 192584 - DNA, 300 bp, Arabidopsis thaliana landsberg
ttttgttgtgtgctcttatggtatattcagtatgaaggagcttacttaactgacggcaaaaccctaagcaactgggacgttttcacaaacatctctggtaagatctcatgaaaccattttgtaaattgtgatttaagctataacaaaaaattcaaaacttttagggtttttgttaccattcttgtctctcaagtcaccataagaaactggcgtatacctttcttgatatatctttgtacaggaaaaattgcggatggaagccatgggaaagtcgctgttgatcattaccatcgatatccg

SEQ ID NO: 192585 - DNA, 70 bp, Arabidopsis thaliana landsberg
atggaacatgagatggtgcgactacccattcatgagcactggctgacacctgcaagagataatcggtggg

SEQ ID NO: 192586 - DNA, 471 bp, Arabidopsis thaliana landsberg
ctcattaaaaatgttcccgtaaacgttgatggtgaaaatagtgagtttatggatatcagatctgctattgatgccctgcgaaggtctccgtctggagtagatcctgtactagaagaaactcttccctctggggttgcctatcaccatgctggtcttacagtatgtttacacattcatcatagatcttttcttgaactggctaaattataatactgggactgtgattctttcctatttacatgggcgacggtgaattttacgcaaagtgaatattccattcattggcacactgggcaactaactctttgtattacaggtagaagaaagagagatagttgagacctgttaccgtaagggtcttgtacgtgtcttaacagctacatccactttggcggctggggttaacctgcctgcaaggagggttatttttcgacaaccaatgattggccgtgattttattgatggaacaag

SEQ ID NO: 192587 - DNA, 148 bp, Arabidopsis thaliana landsberg
gacgccaatgaggatcaggcgcgcctcaatgcacaattagctgccagagatgcagcagggctcagtgtcgagcgacaccaactaggtgtcgatcgacaccttcaggaccagaacgaagatgcgattggtgtcgagcgacacaacagag

SEQ ID NO: 192588 - DNA, 207 bp, Arabidopsis thaliana landsberg
aagaagcttgaatatgatagtaagcaagagaatgggttggtgaaaaaaatgagcattagaaatttgtggaaaggaatgattatgatggctccaaggacggtttgtggaagaagtgatgacgtggatcttggggcatatcatcgggttggtccaagaacaaagaaggttgcaccgacgagtgtcaatatgcgtaccggccgacgctaa

SEQ ID NO: 192589 - DNA, 147 bp, Arabidopsis thaliana landsberg
atgagcaaagcaaggaacgtcggactgacctttttcaccaccctcgccgccgccgccgggttctatgccggctcgcttttcgaggggatgggcgagatcaagcagcagaagcttttcatcgaaagcgcctgcccgcgcaacgtcgcg

SEQ ID NO: 192590 - DNA, 168 bp, Arabidopsis thaliana landsberg
ttgaaaggggttacaatgttagtccactcaaggtcacaaccgggtctgcacagactcagctggatacccgaaaacttgatagccactacacagtcttcctcaccaagaggagaagaggaggacatggctacgttaaaaactttttcggtttggccagtgggcagagcc

SEQ ID NO: 192591 - DNA, 138 bp, Arabidopsis thaliana landsberg
aaagggatagtgtttcaagatggcttcgtttatcactcttcttttccttcacgtgttttgctatatagatcaaactccttgcatgattacaataatgtacgtctcttcccgttgtacgtactcgatatagtaacataa

SEQ ID NO: 192592 - DNA, 383 bp, Arabidopsis thaliana landsberg
cctcgtgttcgtgccgaggaagaatattactggtctccgtattcgatgcccgcgatcaggaaccttctgtgggagtcccagatgagcgagtgggatcgcttcatggacttgctcgaggccggcaagaggccgcgaggcctgagcgacgtggcgatcggcgcacgactgtcgctctaccatggggcggagtccatccgagcggccgagatgtattgggtgcgtccggccatggcggaggcagccatggacgcgtcaacggacatcccgttcttcaatcctgctgttgagcgaccagcccctcacggagtgatggccttcgagcggccacttcctccggtcgagccggggtccgacgcgcaacctgccgaccattacgcccccgg

SEQ ID NO: 192593 - DNA, 547 bp, Arabidopsis thaliana landsberg
gcttagtgtttatatctgggcactccgaagccaagcggtggagccgtttgcggacagcttttgccgagttcacgagctgcactatcagacgaaggctagaaaggatggattacatgacaattttggttgctataattttgcttatcggaaaactacgaagtttcctgtgatcagctaccgaagcaaatgggcagcaggctggaaatcggagtggttctatgtcaaggttgatgacgataaggaaaagcttgtgcaaagtccacttgaactaatcttcggagaaacccgcccccagtgccacatgttaccagagggtccgactcaaaaagcaatgtatgaattcaaaataattgcagagaatatcagtacaagggacctggtccagaaattcttggctttcaaggttttccctagtgtaaaagagtgggagatgccgaagctggaggggaaaagaaaaaaggtgaacttgtacgtttgccttactacttcaaatttaagaaatactttaaagctccttgccaagagtggctggatacgattgaagtga

SEQ ID NO: 192594 - DNA, 458 bp, Arabidopsis thaliana landsberg
atgggactacggaatcgtccggtagctggaggtattcgtcgcttatttgccgacatcgagacaagccccaatatcgtcctggccttcagcgcgggatacaacctcaccatcaaccatgatgcgatcatccaagaacggaaggtgatctgcatcgggtttaagtgggagggggagaaaaaggtccatgtcatccgttgggataaagctcaggacgaccgggcgatgctcgcggagttcttcaagatcgcagaagagcccgacgagatagtggcccacttcggaaacggattcgacatcccgtggcttcggacgcgttgcctattccaccgtcttaacccccttccgctctacaagacgattgatacgaaggcgctggcgtcgaagtatttcttcttccactcccacaagcgggatgacgtcagccagatccatggccacggcggcaaggagaagatgga

SEQ ID NO: 192595 - DNA, 138 bp, Arabidopsis thaliana landsberg
gtaatatatgcgccacttgaagatgtaatgcataagcgtgtggcagctccagaaaggaccatggatagtatgatccaacggttgaatttttgtttgttcataattgttgtaaatatgcaagtgaaaatcaattgggag

SEQ ID NO: 192596 - DNA, 211 bp, Arabidopsis thaliana landsberg
acaatttaaaatcaggtagcagccgtatgaagtatatgattgtcgttgcgtctttggccagtgtgaactactcctacatgtatgattgccatgttcgtttccgcgcagtcttcaccagcgcaaaaaggtcaaggtgcatgcccccttgtctactgtttgtttactcctgttttttttcagacaatgcctcggggaacgattgaacgaatga

SEQ ID NO: 192597 - DNA, 177 bp, Arabidopsis thaliana landsberg
atgtcttactggtttgagaattcaaataaagatatgcgggttagtgagttactgtatcagagcgatttggatgatcctgatttcaccgttccagagagtgagagcaatgtcgacggaggaagtggtagcggggatgagggagacgacgataatgattataggaattttaagaaaaat

SEQ ID NO: 192598 - DNA, 1264 bp, Arabidopsis thaliana landsberg
atgttctgtggatcagattaatgacttggaaaggagtttctcggatcttgatattcaagaggctttcttctctttgcccaggaacaaagctagcggccctgacggctattcctctgagttctttaaaggtgtttggtctgttgtgggtccagaggtgactgaagcagtccaagaattttttcgttcaggtcagttattgaagcagtggaacgcaacaactttggtccttattccaaaaatcacaaacgcttcaaagatgactgactttaggccaatcttttgcttaaacactttgtataaagtgatagctaagctgctgacttctaggctaaagaagcttttaaatgaggtgatttctccgtctcagtctgcgttccttcctggtcgtttactttcggaaaacgtcttgttagctactgaaattatgcatggttacaacacttaaaatatcagctctcggggtatgcttaaagtggatcttcggaaagcgtttgatagcgtcagatgggatttcatcatctcagccctccgtgctctcgcagtccctgaaaagtttgtttgctggatcaatcagtgcatttcaacgccctatttttcagtcatggttaatggttccagcagtgggttttttaaaagtaacaaagggttgagacaaggtgatcctttatcgccgtacttatttgttcttgcgatggaggtgttctctagcttgctgaaagctaggtttgatgcgggttatatccactaccatcctaaaaccgctgatctctcaatctctcacctaatgtttgcagatgatgttatggtttttttcgatgggggaagctcctctctacatgggatcagtgaagctcttgatgacttcgcctcttggtcggggctgcatgtgaacaaagataagacaaatttgtatctggctggaactgatgaggttgaggctcttgccatttcgcactacggcttcccaatcagcactttgccaattcgttatcttgggctcccgctgatgagtaggaaacttaaaatttcagagtatgagcctctgatggataagcttgttaaaaggtttagatcctgggcggttaagagcctttcttttgctggtcgggttcagctgatcgcctctgtcattacgggtcttgtcaacttctggatgtcgacttttgttcttcctcttggctgcgtgaaaaagattgagtctctttgttccagatttttatggtctggcagcattgatgctagtaagggagcaaagattgcatga

SEQ ID NO: 192599 - DNA, 705 bp, Arabidopsis thaliana landsberg
gtacttttctctggcgctgatgccgtggtgcctcctattacaacgtctacattatcagatgatgagaacgattttgatatgacttcacctgaagaattttttgaggtggaggagatctttagcgatgtgattgatggacctgaccataagagagactcggatagttttgtggttgttaatactgcttcagatgattctgagggtaaagaggtgtggaagggggatgtggaacccaatgcgtttctagattgtgcatcagatgattcaaaccataaacatgatatgcatgcagagactagcacggatccagtcaaagatatcactgtggatgatgtacagtatagatcggatgggaaggcagattctaatatcgactcagtgaaggatataggaatagatgatggtgatgagcagcgaaagagaagaacagtggaagcaaaggaaaatgattctagcacagtacagactcaaagcaaaggtgatgaagaaagtaacgatttggaatctatgagtcagaaaacaaatactagtctcaacaaacccatatctgaaaaaccacaagctacactaaggaaacaggtcggagcaaatgcaaaaccggctgctgctggagattcccttaaaccgaagtctaagcagcaagaaactcagggtcctaatgtaagaatggctaagcctaacgcagtctctcgatggattccttaa

SEQ ID NO: 192600 - DNA, 103 bp, Arabidopsis thaliana landsberg
atgaacaaaatccttgtttacgtactagctttgagtattctcttgttctttgggttaccaaatacaacactggcccgagtacaatatcgatctccaggttcaa

SEQ ID NO: 192601 - DNA, 152 bp, Arabidopsis thaliana landsberg
aaaacgaggaagaatttgaagtagaagaagagaagacaccacacacttcggaatctcaggccggaaattgtttctacttcgatatctgcgggtccgagcctgactcacctactaacaaaggcaagccccggtgcatgtgccaccttccttga

SEQ ID NO: 192602 - DNA, 771 bp, Arabidopsis thaliana landsberg
atgcttgaagctgttcttattcgaaatcataaacagatcaagatctataacgagaaacagagtcaacttcaagtaaagctacagagaccagaaaaaaatcagatctaaaaatctaccaaacgaaatcgaaagaaaggagaagaagaaacagtgagagagagacctctggtgttgagtaagtgagaaaagtcgtcggcggcggcggtggcggtggcggtggaggcggaggcggaggaggagaaaatgatctccgacgtgaaatgagagaagagagaagacggagagatttataggagagggaagaagaaggaaaaaaaaaaacgatagagtgaagaagattgatatttataatgacggagaaacggaaaagtttaacggagtttcaacgggactggtaaaagagaggagaattttagtttaccggttataaccggtgaaaaaggtagactttgtgaagtctacgtggactaaacgacgacggattttgtgacttgggctgatttggcgtttgtgtttttcttcttggaaacttgttttatcggttgcccagtttttttttttgaccgatacaccaaactttttttgaagtgttaggtggacagtacatttactaggtatttaataataatatatttactatgatttttgtattaattttttagaaaattgacagcctctaaatgtatttatctctccaagttgttagggtttattcgaggtcgtcccaagttccaatgtcttaagtccaatattagatccgaatcggactaa

SEQ ID NO: 192603 - DNA, 319 bp, Arabidopsis thaliana landsberg
atgcttcagcctgaggacattttctcccgtcgttgtatctgggtgaatgggcctgtcatcgacggtgctggcccatcaggcctagctgtcgccgtcgacctgaaacgccaagaagttccgtttgtaattcttgagcgagctaactgcatagcttctctgtggcaaaacataacctatgatcgtcttacgcttcatcttccaaagcaattctgtcaattacccaatttacccttccccgcagatatcccggagtatccaacgaaataccagtctattgagtacctcgagttctacgctacccactttgatctccgcccca

SEQ ID NO: 192604 - DNA, 49 bp, Arabidopsis thaliana landsberg
atgagctcggagaggagttcggatggagataaaatagcagtgttcagcg

SEQ ID NO: 192605 - DNA, 239 bp, Arabidopsis thaliana landsberg
acttccaaggcgctgcagagtgttttcgaggagctattcaggcggccctcaccactaaaccaccaacgacttcctccgcacaggcgaacacaaagcctaaagaagatctcacgatacccgcgaatgaaactcaagacgtgacctccatgcggccgactgaggagacaaagagtatcaacttagggttcgctgttgaacgcaagaccgccatcatcagctccagcctcgacgacaaatag

SEQ ID NO: 192606 - DNA, 186 bp, Arabidopsis thaliana landsberg
atggttatccaagtgctagaaacagtgactaaagaagaagagagaaaaagggaaggtcttggctctgtgcagccaaacttcagctcagtctggcacactggactgtccggtggtgtgtccggtgcgccaggctggtccgcggtgaactcgccgctctcgggtttcgacggcggcgtacggctataa

SEQ ID NO: 192607 - DNA, 167 bp, Arabidopsis thaliana landsberg
atagacccccatacaaaattctcacgtgtacagggggtcatccagttgatattcaacaatcaacgcctcgcatgaacctgagatcttttcacgctaccaattggcaagacaacaaaaataaagtaaataagaaactattcgatcacacggactcatcttatgactaa

SEQ ID NO: 192608 - DNA, 396 bp, Arabidopsis thaliana landsberg
atgttgaaaagccaacgcttttatattgatctaaagaagaaaaaaacagagtctgtcaagctcttacacattaaggtccttgaagaaaaacaaggttcgggtgagatagagacgcacatatcgtgtatgagtccattatgaagaaggaaagttgaagaatgggtggtatacattttgggggaaatgatttcaccaaccttgttggtgccaggggaactcatatcaaccaaagggaagggaagatcaactgtttgcttggaccaatcatgtttattgaaatcctctctagtatccacaaatcaaaacgttggaaagaagcatatgcgtttcttgcaatcgacgctagcttccctaggggctttgttgggctccggagggaaactcaaggcccattaa

SEQ ID NO: 192609 - DNA, 347 bp, Arabidopsis thaliana landsberg
aacaccatcgccttgatgctggcgctgctgaagaagatcgcccgccgcgacgccgatgtccgcgccggccactggcgcgaggaacggcacgccgccaccttcctcggcgcccgcgtctccgacggctatcccggcatcacggtcggtctcgtcggcctcggccgtatcggcacgcgcgtctcgcaattgctcgcgccgtggcggctgcgaatcatcgcgtacgatccttacgtgccgccgaccagcttcatgctcgccggtgtcgagcgcgtagattacgacacgctgctgcgtcactgcgatgtcatctcgtttcacgcgacgctcagcgacgaaacccgcatgat

SEQ ID NO: 192610 - DNA, 210 bp, Arabidopsis thaliana landsberg
ctgttgttgtggtgcagacttcagttgttgtgattgagcagaaggcgaaaaagaagcttgtgtttgtaatcaacaagctcatgtggtgtgcttgtctgttcatatccattgcctttgtttctctctcttatattgttgttggcaaagaggagatgtggttggctgtttgcgcgactgttatcggcggcacgattatgttgactacgattg

SEQ ID NO: 192611 - DNA, 117 bp, Arabidopsis thaliana landsberg
atgcttgattcttgggatcaaagtcatcacctccaagaaacgtcttcttttaagaggaagctgcttgacgtggagagtttatgcaaaactaactctaactgtgacgtcgcaagacaa

SEQ ID NO: 192612 - DNA, 246 bp, Arabidopsis thaliana landsberg
gattcgaccggcaagcccttcgcccatgacgacctgccgcgccagaaacatgcccagaccgccctggaagccgccgcgaatggccgcctgccggaagccctgacctggaaatcgccgttcgtggcgcgcaccgccgccttcgccatcgcccccaccgtggtttttgacgatgacagcaatgccaatgtcaccattatcgaggtctccggtcgcgaccgtcccggcctgttggcggatatcgtagag

SEQ ID NO: 192613 - DNA, 540 bp, Arabidopsis thaliana landsberg
atggcgcctcttcttcctcttttagtcgaagatcctgaggaagcaaaaatccagaaacttgtccacggttacttcgctgaaggagattacatcaaggcattggaagtaatcgaagattcgatttcgactcgtgggaaggaaaaggttccagcaatggttcattacctacaaggttgtttcttttatgaacaagggactaaaacagaaaacagtgacatgaaattcccattcttgttggcttctgtagaatgcttcacggaagattgtggtgtacacgcttactctgcaattgcacttttagaattgggtaaactgattggctcagcatcattttacaagaaagctctgaacattgcaaaagaaggtttatcttttattgcttcttttggtggtttgaacttgagtgaggaaaatactaaaagttctcttgagaatgtagtcctagtggcagagtcaatgatcccaaaacttcaaggaagtgtaaggagtgactcggatacggctgcgacagaggcaatgatcgaagcggcagattcaatg

SEQ ID NO: 192614 - DNA, 303 bp, Arabidopsis thaliana landsberg
atgatgtgtttccaaaacttcaaagttcgtaaattctttacgtcgaggaactccggtaaagtatctccagacaccgtctcaaaatcagcggagaacagattgtggaaagagtttcaagaaatagatagcgttctgaagatccatgtgagatcgtggttaccttcgccggaaaatattttccggtgggaagccaccgttaacggcccggtgggttgcccttacgaaaaaggagtcttcaccgtctctgttcacatcccacccaaatatccttatgaaccacccaaaatcacattcaagactaag

SEQ ID NO: 192615 - DNA, 371 bp, Arabidopsis thaliana landsberg
  unsure (1)..(371): unsure at all n locations
cgctaccgactgcccaaattcctgaatcagttcgtcggcgtcgtcacgcgattcgaggtagtcnnnnnnnnnnnnnnnnnnnnnnnnnnnnnnnnnnnnnnngtcgcgccgggcgttccggtcacaagcccgcgtaacagcccttcgattgccgtgtagcgatcaaccgccggcgcgccgtccatgtaagtcaccgacttgttcagcggcccgacgcccttgctgatgcttttgatctgcccgccgcgttcaagcgtgggctcgagcgtcgcaccggaaagcgcgagcagcgccgcctcgactgcggcgtttttgatttggaccggtaccgcgtccgtcgggatttcgaatccatccgggtcgatgacgcc

SEQ ID NO: 192616 - DNA, 261 bp, Arabidopsis thaliana landsberg
atgactccattttaccgggggaacggggatgatacgaagaagtgcattttggtcagtatcattgtcagctatccgtagtccggctaacagcacccaagcatcaccgaacaagcttgatattcccccaggaacggttcagtgatttggtgatatcgtaccatgcaatcgacctgatgcagcaactgctacaggtcaaagaatccaggctatcaagcaagcagtacaaagctaatgactacttcttttggcctggctttcgtg

SEQ ID NO: 192617 - DNA, 619 bp, Arabidopsis thaliana landsberg
gcagtggcagcgcaacagtttttaattcggtggaagatcgacgaacgacgcacaggtgcgccatggctagtcctcgatcgtgataaacagtagatcgaatctacatagtaagacataccgtttgcgtagagataaatcgaagcatgtcgcgtaggacagttcggcttaggccagagacctgccggcttgatggagagttgatgcagatctgatcccgcaacaacgttgaggtagagcatgctgataacgtgttaagaactacgttaccacggatcaccagatccgctcttgtcggggaccataattaggggtacccccaagactcctaaactcagctgtaaccaccatcagcacaagctgcaaaggcctgatgggcgcaatacaggtcaaggctccgtccactcaagggacacaatctcgcctcgcccgaacccagcctcgggcaggaacaatagacccaggtggattcacgcctcgcccgaaggcctcgtcaagcaacgggagcaccttcgactcgcttgaggcccagctcgggcaggcttcacggagaagcaaccttggccagatcgcctcgccaaccgaccgtatcgcaggagcattcaatgcaaggatcgtctga

SEQ ID NO: 192618 - DNA, 1167 bp, Arabidopsis thaliana landsberg
gttatagttttagatactagatatcatagagaccctttaagaagtgacgggagcatattgggtgatacgcagtgggactggctcgaaaatgaattgagcggtccccgaagcgaaatcactatcataggatcctctgttcaggtatctgcaaattagacttttgtgtcctgttccagtttggccatggacttaaacttgatgaagcctgagtgtcttattccatctagaactgttgtctcttaacttgtccaggtgatatcaaatctttctgctaccactggacctctcttttatatggaatcatggggtcgttttccaaaggaaaggaaacgtctttttaaactgatagcagatactaaggtatgggattgttgacagtaatgtttccaactgtcagttttcttctttcctcgtccccataattcttcgttgctttgacattacagagagatggagttatattcatcagtggagatgtacattttggagaaatcacgagatatgattgttctgttgggtacccattatatgatgtcacctccagtggtctagtacaatctgttgagaaagttgtccctcgtcccttgcgttccatagttaggcttcttttttggtatactccaagcacgatgagagttatcaatgataactgcaaattcaaatcttgcacatacggtattattctcaatttgattccttttacgttttcttctgataaactgtggaaagatttattgacaagccaagacacagtgagtctactttaagttccaactttagctctatagctctactgtcactaacctaggacggaatatagtagactgtaactgttgtgagttgatttaacagagcagcgatgtactcttttgtatgattacattggttacaatatcttaaacttacgtgcaggacaacaaaattttggagcaatatcgattgattggaatgcaaatccggttaccataaagctcgagatcagagatgttaacggagacactgtactaggcacgaatgtttcattatctgaactccaaccaggaggctcgaattctttaaaagatacaacaactaagggaaagtctcaacgatattgcacactctaaattgaattaccaggaacgaccagataccgattggcagttctcatctacttcaccattgctg

SEQ ID NO: 192619 - DNA, 457 bp, Arabidopsis thaliana landsberg
cttcagagtctcaacttgtcgtcggggtactggaaaggctggttcgacgaaagaaaaggtttgtacattcgttttcggttttgttcttgtattcaagtcccctaacaatgtaaaatactttactgcttatataggtggtaagggcctgggaagtttaagaaatcttgagactctggatctcggtgtcaacttttacgataccagtgtcttgccatacttgaatgaggctgtgtcgctcaagactttgattctccatgacaacttatttaagggtggctttcctgttcaaggtaggtcctccagaacaaatcaaactatatatatgtcactgacattgaaagtcttttgcacttatgaactgatatctcttactttggcacagacctaataaatctttcacgtttggaagtactagatctgaaattcaacaagttcaatggccagttaccaacacacg

SEQ ID NO: 192620 - DNA, 284 bp, Arabidopsis thaliana landsberg
atgtattaccaaaaggctttggagcttcaggccttctttgatctagctaatgaaagaggtgcatgaaagtctttgttatgattacttttatttgtagaaactatggacatgttccctcaaatgcttttgttttgttcaagaattaatgaaaggatacaagagtgccgaagcttcaagtagtggaagttcactctgggctgagtgtcaagcacttgctgatattaaattcacctatgtggtcgcatgccaacaatacagtatacataagagatctggtgaccaac

SEQ ID NO: 192621 - DNA, 606 bp, Arabidopsis thaliana landsberg
atgtcgtgcgcgttcgacgactactatatcaaggactacggcgtcatcttggcaccagaggtgacgcagaggaggaccgacagcaatgaccactcgccatcgtcgaggtagcttttgtgccggtctgcctttaattctcttcgcaaacacatacacttgcttatttgtttaaggaagcgtgtatggtggtgcgtacctgatgactgacaatgtacgagggaacttctaccggcaggtgtgacacgtgctctataataatgagaccatgcaaatcgtggcatatatcgaagtttgcatgatactgatggttgcaatgtagtagtgaaacgctaaattaaaataacaaaatttatgtatggctaggattacaaatggattatgaaatatttttttataacaatattgtgagtcattttcataaaccaacatgtactacctcgctgatgagctcggggtgcacttcgtttggcagcctagccaagagtcatcggtactcgccatgtcgtgcgcgtccaacgactactatatcaatgactatggcgtcatcttggcgccagaggtgacacagatgaggaccaacaacaatgaccactcaccatcatcggg

SEQ ID NO: 192622 - DNA, 215 bp, Arabidopsis thaliana landsberg
cgcaccgcctaactaatgagaagctcaagatgtctgagaacactccgaatgaggaagcatattcgacaatcgacatcatccgatgccttgtgtcagacaaaaacagcaaaaacgacagtgtttcaaccaaagaaaagattgtgttgggcttaagtgattcagacccaaaccaaaagaagcccatgacattacaacggtcattcattctcaactaa

SEQ ID NO: 192623 - DNA, 2158 bp, Arabidopsis thaliana landsberg
atgaactcgtgctgcgagttagctcgtctggagcttagaaaattgatcgtgaagtcggttggtctgagttttcaaggctgcaaagaataggcaataactctcagcacagagattggattcagccgaggttgggcttttcagaaatctgacattgagggcaattcgttgatatattacgcctcatgagactatctgtgatttgtcgagaaatcggccccgagacgagctggactattcagacggattgtagtttaacagactacatctgacacagaaaaccggagataactctcagaagaggtatctgattgagacggggtttgattctctggaaagctaatatccggggcaatccgtgaacatattattcgttgcgagattcattgtgacttgttgggaaatctgttccgaggcagactggtctattcggacggatctgttaagaaacagacagcatcgacttcagaaaaacggcgataactctgagcagagatatccgatggagttacggttagattccctggaacgctgatctccggggcaatccgtggaattgttgtacgtcatctggttcattgtatcttgacgggaaatccccccgcaagtagacggatctgattgtcttggtttgatgagcgtacatcgaatacttggatgaatgatatgcgaagagagttctttgtcgttccccacagacggcgccaattgttgaaccaaggattcacacaatagatttgtttagagagggaaaacaaatctagtaatttctcttcattaggtattctatccaagactcgattacaaaagaggttctaatctcttatgaaatacattagggttttgctcaacaacagaaaaagagttatggttttaaaaaggtatagctgcatccataatggattgcctacgtaccctgtgaaaggatcaagccattcgtagttctcaataggtataaagttatgtgtttcttgtgagtatccaaagatgacccttttgtgaagtccctgagacactttatatagggtcgttaaaccgcctccctcgcgatattctcgaaagatttccatttatccttaagtcggttctggaggataatcgtattaaagatattttccatattcttcggaggcttcggaaagatttcttgatccgacattatcttcaaagattgtcctttatcatttccgaaagtcccataaaaagatcctattttactggaaatgatcctttgagaatgaatggtttttacaagtttttgcctcgggtgttcttcacggctcgatggtcgtttgaaaggtggcttcgggcaaacggtatgtaccggctcgggcgcgcttgatgactgtccattaagctcagttgggtgtctcccgaggcgttgtagatgttttccgcagcgttctcacgataggctcgggttgtattcataggattaacacccgagccattttacgaactctctccatgacggttgatcgaataaggtcccgaggtgctttgttctaggctaggggccaatcatatgtttaaccatgaggtgattgttattcttagactgtttggctcggtcttgcttgtgggggaattcgaccccaacagttagccctccagctcgttagttaagagttaatgcgacgagctttatgaatggtgtgaccgagccagctgcttccgcatctaaactgactaatccgtatcttttgagagtaaggcttgttttttcttggtgctacgagattctgttcttgacgggtgttgctatctcgaattcaaaatgttagctgttgacaagttgagctaggaaagctgctaggagacttgttgaagaactccaagctgttgacgagctgttaggccgggcaatagctaggaaggctgccgacgagctgttagctgggcgaactacgagtcagagaaactgcagacggactgtgagctaggaaaagtgcagactaggtgctagctagacgaactgcgagctaggaaagctacagacgaacagggagctaagaaagctgcagacgagctgttagctaggcgaattgcagacgagctgctagctaggaaagctacagacgaactgggagctaaggctgtagacgagctgtcagctaggcgaagtgcagacgagctgctagctagacgaacttcgagctag

SEQ ID NO: 192624 - DNA, 559 bp, Arabidopsis thaliana landsberg
atggacttaaacgaatatgcaacaacacacacggtgcatctaaatttcactctgagaagagagctacacaaacccaaatctcatagatcgcagactaaacctctccttaaatggggagactcggatataaaagagtggaacgttgctataagcagctacatgcgtactggaagatgcaacgaagcgcttcgtgtcttcaaacgcatgcctaggtggagttccgtttcttataacggtatgatttctggttatttgagaaacggtgagtttgaactcgcccggaagttgttcgatgaaatgcctgaacgagatttagtttcctggaatgtgatgattaaagggtatgtacgaaacaggaatcttgggaaagcgagggaattgtttgagataatgcctgagagagatgtttgttcgtggaataccatgttgtcgggttacgctcagaatggttgtgttgatgatgcaaggagtgtttttgatcgaatgcctgagaagaacgatgtatcgtggaatgcattgctctctgcttatgttcagaatagtaagatggaggaggctt

SEQ ID NO: 192625 - DNA, 312 bp, Arabidopsis thaliana landsberg
atggcgaagatgagaccatctgtttcgttggatacttggagagagtatttccggcgaggagattctgatatttttggtatcattgatcatgcgattatggtagctgctgcagattggccaaaggagtttaaatccaggagagatagaattgctgagcttctcttctcttgtaaagtgagtcgctgcattggttgtgaccaccttgagctctcgatagctggagacgaagcggcggtggagatagttggagttggcggcggcggtgataggggtgattctggtgttgcgacgggtgaaggtgaacaggcgtct

SEQ ID NO: 192626 - DNA, 135 bp, Arabidopsis thaliana landsberg
cgaaatcagtttaatgtattccgatacataaaccgtagctctaatttagcttatcagaaagacaaaaaaacgggtaaaaaaattgattgtgttagttgtgtagtgaaagcaggaaatgaaaaaattgctgaatga

SEQ ID NO: 192627 - DNA, 992 bp, Arabidopsis thaliana landsberg
gaggaccagtcctggggtgagctccgcgagtgcgcagaggctacggtggggtcgctccggtcgtcgctggaggttttctgcagagacgtccccaaaatcctccaggtagcggtttcgggcataccttttttccttctgtgggcgagacacccgtcgtgacgccctgtttcctttccccaggatatgtcggaccggagcgccgccaagtcgtcgttcatccgccgcgaggttgatgtctggggctcgctgcgatccctgaggtccttgctcgccggggctaccgcgcgcctttcccagcaggatgccaaggtggcggacctccagctgctctgcgccgacctgagagccgaggcggctgcagcgcgtgcggaggcgcaacggcagcgatcggagctcgcccaggtcgtcgaggaacgggaccgacttcaagaccgggctgccgaggccgaaagccgagccgagacccttgcggccgacttagctcgacgcaagtcgcggcctcggagcaccgtgcccgagccgggagtacgtcttggtcctccctagttctttttcttgtccgtatccgttgcttgtacttgaggtatctctcctggctacttgcagaacttgagtccgcccttgatgagtccccaatggcgcttgctgaggcgcttgccggagccactgagcagagggaggcggaccttgcggccatgtccgaggccgtctcggacttttaccgtgccctcggttctgatgacgtcccttcaggaagctcccctcagagccgccttcgagccctgggtggtcacgcccgcggcagagtccggaagcgctacaccatggcgtcaggcgtgccttcgccgtgctcgcttctcactatgttgtggatctggagcgggttagtgaggggtactgtcttcctgacgaagacgatgctgctttggcggaggtgcagcggcttgacgcggttccgctggcccgagcgcggtgctggcgaccacctttga

SEQ ID NO: 192628 - DNA, 188 bp, Arabidopsis thaliana landsberg
atgtactatgaaatatgtatcattgctaagccgcacaatcatgaaattttattttggtactacaaagccgcaaaatcagtactatgcatcattgcaaaatcagtactatgcatccgagagagtgttgaaaaaaaaatttggtacaacaaagccgtaaaatcagtactatgcatcattgctaagatgag

SEQ ID NO: 192629 - DNA, 266 bp, Arabidopsis thaliana landsberg
atgaactcttgccaacaaaaggctatggagaagttgcttcacgggcatgggtgcgccaaccagctgctcatcatggaccagaccgagtcagactcgtccatggaaagggaggatttggccaagtccgtcctccattgtttctcagatgcgctctccatcttgatcgatactaatgaccaccaagacgatcaatccaataactcatctcctcaggactcttctcctgttcttgagagctccaggaaaccacttcacaagaggggaag

SEQ ID NO: 192630 - DNA, 156 bp, Arabidopsis thaliana landsberg
aatccagagactttggttggtttggccgtatcaactagaaaaattgaacctcttatatgcgagaagtcgcttgtgttcttggaaccaacatttatcttttgtctcgtcaggtttacaaagcgcttcttggaagctgactcaacagcttgctgttaa

SEQ ID NO: 192631 - DNA, 737 bp, Arabidopsis thaliana landsberg
atgagcagagattcagtaagaatcgttggggttcttctatggatgtgtatgtgggtttgttgttatggggatggagagtatctgttgtacaaggacccgaaacagacggtgtcagatcgagttgcggatttgtttggtagaatgactttggaagagaagattggtcagatggtgcagattgatagaagtgttgccactgtcaacattatgagagattacttcatcggtatgtaaaagaacaatctttcttggagatttccagaaatctgtttacttacttgcttgtctagtttagttggttcatttaaacgttattttgggcatctgtatggctaccttagaaaactggtcggtgctgctggtgttgttaggtgaaatgaggatatcattcagtttttgctttcattgaacttcagtttctcatcatcttgttaataaagaactagataagctgcgtaacttgacttggtatggagtatctgtatttgtgaaacttgaaaattgaagttgtctgtttgttctgtacaggcagtgtattgagtggtggtgggagcgctccacttcctgaggcaagtgctcagaattgggttgatatgataaatgagtaccaaaagggggctctagttagtcgtttgggaattcctatgatatatggcattgatgccgttcacgggcataacaatgtctataacgctactattttccctcacaatgttggtcttggagccactaggcaa

SEQ ID NO: 192632 - DNA, 253 bp, Arabidopsis thaliana landsberg
atgctagagaacggcttaaagcctaatgattacacaattgctgctgtgctctctgcatgttcaaaatctggtgctcttggatcaggaataagaattcatggttatattttggacaatgggattaagttggatagagccatagggacagctctcgtagacatgtatgcaaaatgtggggaacttgactgtgcggctactgtgttcagtaatatgaaccataaggatattctttcttggactgctatgatacaag

SEQ ID NO: 192633 - DNA, 548 bp, Arabidopsis thaliana landsberg
atgcctgactgggtcgaggcacgtattgcggttactggtggaagtcacaagtatctgaaagagattacttatgccaaaggcctttatgtatgcttatcagtctcagaggtaataacaaatcttgtgatttatttacatatatatatattactgttcctcagtaataatatgactgatgttgaaacaggttatgaatccttacgacatgatcttccacatgcttgttgaccttacgatatgtacatgtactcaaggttggtgggatcttcttactcatatgctccaaggttcccccaaactacggtttctcacactcaccaatgtatgtattctttttatttacttttagtttggaaaatatgattttgagaaatgataactaagtctaagttgttcttaattggtattaggaccattgccgagaacttcctagtttagagaccccggcctgctggaaacggccgagttctgttcccgcgtgtttgttgtccagtcttcaagctttcacgtggagtgggtataaagggaggcaaggagataaagaagtg

SEQ ID NO: 192634 - DNA, 624 bp, Arabidopsis thaliana landsberg
  unsure (1)..(624): unsure at all n locations
atgcgtgcnnnnnnnnnnnnnnnnnnnctgatcaagttggagggatgtggtggtagtgtagcagaggtggatcagagtaagctgttggcgaattttccactattggagcaccaatggcagatagttgagagttttaaggctcagatttcgcagaggagccatgagcggcttctagatccgggtttaggactgggagcttatgtggatgccttaactgctgtcgcggtggttgatgagcttgatccagagcaagtgcttgagttgtttctagactcgaggaagacttggattctgcaaaagttgaatgcttgtactggtgaggatgcgggtgaggttgttttggtgttttgtgatgtgttaagtgtgattcaggttacagtgggacaagttggggaactcttcttgcaagccttgactgacatgcctctattttataaaacaatcttgagtacccctccagcttctcaactgtttggtggaattccgaatccagaggaagaggttgagttgtggaaatccttcagagataaactggaatccgttatgctcatccttgataaaaatgacgtttctaagtcttgtctgacttggttgagggaatgcggtggacagatcgttgcccag

SEQ ID NO: 192635 - DNA, 366 bp, Arabidopsis thaliana landsberg
cccttggtgcctaacttcatccagtcgacaccgcaacgtgttggtgacaggatagatgcttgggatgcgcaagccaacgttggcgtcggcataggacctggggacatcaccggattcggtcctggaggtgtccactatgcacctggcaactatggtctcaacaactacgacaataaccttcgacctcttcaaattaaacccgaaattgactcaagaccctaccaacccaacaacgcctacccagattttgggctagcaggacgcaatgggccggcgtatactcctatgaacggctggcttgaaaccaccgacgcccgtggacaaatgcagcttacccctactcaagtccacttgcccgtcgatgat

SEQ ID NO: 192636 - DNA, 274 bp, Arabidopsis thaliana landsberg
catcacctcaccctctacggacagaccaacagcaacaaccagtttcttcatcatcaccatcaccaccactccttgtacgggtccaccaccaccaccactccttacggcgcctccgatcccatctaccatccccactcttccgctccgccagcctccttgttctcctacgaccagacaggaccgggctcgggatccggatcttcctacaacttcctcatccccaagacagaagtggatttcacgtccaacaggatcgggctgaacctgggaggcc

SEQ ID NO: 192637 - DNA, 261 bp, Arabidopsis thaliana landsberg
atggggactatgtcacacatctacacactgctttgcaagaatatggcttttccctatgacgagcccaataacttgcggaaagaaatactctttggctgtgccaataacttggaacttttatgtgagagacgcccagtagaactttggcgtcactactggacattatacttctagcaaagactcatttccaaaggaaattggatggaaacgacaggattgacccatttgaaagactgcttcacaacttggatactgtttact

SEQ ID NO: 192638 - DNA, 51 bp, Arabidopsis thaliana landsberg
atggtggtgcctcctctcaactcagatcttctcaaggaaacgatcaacaag

SEQ ID NO: 192639 - DNA, 1096 bp, Arabidopsis thaliana landsberg
  unsure (1)..(1096): unsure at all n locations
atttcgtggtggaaggtaattgtggagcaaaacttaccgggttccatggaaggtctggtactgctctgtttgctattggagctcattttctcgcgccttcttctcctgtgaagcagttagaacctcaaggtggagacagaggatatgcttgggatgatggtgtttacgatggtgtaagtaaaatatcggttacacaagatggtagctacctaagctatgttaagttcaagtatgttaaaggaagcacatctgttcggcattctcacggaaagatgaaccaagaaccaaaagagtttaaggttgattatccaaatgaatttattacatcagtggaaggaacttacatttttgtggttatgtaacctcgcttactttcaaaacatcaaagtgtagaatctctcctgtatttggaaaagtgtctagtaagaaattcgtccttgcggtgcttgtcggattccgtggacgtaatagtgaaagtgacaatgctctcagagcacttggagcannnnnnnnnnnnnnnnnnnnnnnnnnnnnnncggttccagcgccagtccccacacaagttccggctaagaaactagaagcaaaaggcggagatggaggagccatgtgggatgatggtttctatgaagatgtgaggaaggtatatgtaggacaaggtgactccggtgtgtcttttgttaagtttgagtatgctaatcgcaaggagcttgtagctggagttggccatgggaagatgtcaattcttggaacagaggaggtttttgtgctctgttctcgtattgacctaataatgttttcttgagatccaagtttcactggtctttgtattttgtggcagtttgtgctcgattctccaaatgaatacattgtatcggtggagggaagttacgataaagtatttggagtggaaggcgagttggtgacgatgcttaggttcaagacaaacaagcgtacgtctccaccgtttgggctcgatgcaggcacaacgtttgcggtggagatgaaagatcataagatcgttggattccacggcaaagctggagattttgttcatcaagttggtgtccacgtcacccaaatcaccaagtcttaa

SEQ ID NO: 192640 - DNA, 412 bp, Arabidopsis thaliana landsberg
atgcggggctggtcgtcggcgagcgtcgtcagcttcagcgcgttgggctcgctggctcagctggctctggctcggctcccggtgccgccttccaccgctaagcgtggcacggctgtcgcgccgtgcgtaccgggggaccgcccaatacgtcgcgcgctgcttgggtggcgttcgtgttcttgggctgtcctacctttgctccggtacggcgcccccgcgcggaggtcggtgctcgcccgtccgggaggatccgagtggggatctgccggtgggcagatggcttccgtcgtcggcgctgaggtggtggcgactgaagaagtcctcgtcgtcgacgggatcaccgccaccatccgcgctccgggcttccgactctttggctttgatggcttgtcctcgcccctcgagtggggac

SEQ ID NO: 192641 - DNA, 495 bp, Arabidopsis thaliana landsberg
atggcgacgtcatctctgaaactgaccagtgcttgtttcgtcttgctcttcatcttcgttggctgcgttctcacagcaacaaatctccgaaacaacgaaatctctcgatcgaggtgcacatttataattcttcgtaatgaatgtctctaatctatactcgtctctctacctaaatatatctcttttctgtttcctctagttcacattttaagctacattttcattatttcatatgttttctcagtttttcttagcattatcatgcttgatttgaaatgttgtacacttcacataaacgaattttctcgtcccttgaagttttcctatgtatatttaacgtatgtctcttttatgcgaatttttaaagtagtctcggagatttaagctatggattttgaacttaaaactaatcttttttcctcggtgattttttttctataggaagctgaaaacagaggattcaaagagctttaacagttcaccaatgacgactag

SEQ ID NO: 192642 - DNA, 83 bp, Arabidopsis thaliana landsberg
atgtggaccaagatatccaggactggtgggatctccgatgtctacaagataatactttccattcgggggttgaaagaaaaaag

SEQ ID NO: 192643 - DNA, 170 bp, Arabidopsis thaliana landsberg
gaatcattccccaaggaaggcagtttaacacctttgaagaggagagctacttaggaaatcctctgctttgtggaccaccgaccagcagaagttgtgagactaataagagtccagaggaagcagataatggacaagaagaagaagacgataaagctgctattgatatgatg

SEQ ID NO: 192644 - DNA, 791 bp, Arabidopsis thaliana landsberg
atgccacaaatgaaacggcgaaatgtagttcagcaaggacaagataaactgaaaagagtgtttggggagacgcaagaaagggaggcggctagaggatttacaaactctgatctggggaattttaagaggcagaagactgatgattcccatatgcgtggtccatctgcaggcaagttgtcgaatcaaataggtgcaagtaggtccagtactcctttttatgctgccaatgaaaatactgaatcttccaacaccataggctctcgtcatccgtatgtacaagcattgttacgttctgatataaagaaagctcttatggacagaggccagtcagagatttttaagagacttcctatgatgatcgctaaaatggaagggaaggtgaacccaactgaaggggagaagaacagtacgaaggcaatgagtagcaaggcaagtgaggttgaaaggagcaagatgagtagcacggcgaatgaggttgaaaggtcagttgaggtaattccccatgattcagatgaagagaaggatgatgaagtgaaggaaatcgttgttccagattcagactttcacaactttgatcttgaccgatctgaaagtgcttttaaagacgatcaaatttgggctgcttatgacgatgctgatggaatgcctcggttttacgcccgcatccaaaaggtgatttctgtgaatccttttaagttgaaaatcagttggctcaattccaaaaccaccagtgaatttggtcccatagactggatgggtgctggttttgctaaatcatgtggggattttag

SEQ ID NO: 192645 - DNA, 55 bp, Arabidopsis thaliana landsberg
atgatcgtcccagccgagaatttcgggcgcggcaacgccgtcggcgccgatcacg

SEQ ID NO: 192646 - DNA, 323 bp, Arabidopsis thaliana landsberg
tccaaacccgaacccgaatccgaaccggaacgtcgttatcgtttgagccccaactccaactccagcctgacttaagactccagttccaactccttcttgaaccatcacggttggtacctgaacccgagccagaatcgcggttggatcccgtgccccaaccccaaccagagccattattagagtttgaagccaaacccaagccggagttatcatcggatccccaaccagggaacgagccccaactccaacttgggccgtcagagtctgaaccaggacctgagctagagctacttgacccgtcagatccccaacccgacctgtaa

SEQ ID NO: 192647 - DNA, 250 bp, Arabidopsis thaliana landsberg
gatcgaagatctatggactaaactcgaccaatatatttcaagaatggtaatgactaaatcatcattgaaagctgaaaatatgactatgatcgatgtatctctagaggagatatcaaatgaatgtgaggtactaggtgtatagagcacatgaccttactatatatgtcaaatttggtttggcttgcagagaaacggctcggatttctccatgatggttgtttatcagtatgtatatgcgtgtcccttcaga

SEQ ID NO: 192648 - DNA, 387 bp, Arabidopsis thaliana landsberg
gggctcggactcgacctcggcctcgaaagacagactcgacctcaacctcggaggagcctccgcctcgcccaacccagggcacagaccgaccacgtcaacaggaggcaccatcattaccctaccccaagctaactcaggctacggggaacaagaccggcgtcccatctggctcgtccgccagacaagtaatgatggcgccccgcacgctctatgacgacggcggctctcagcccccttacggaagcaagaggacgtcagcaaggactcgacaaccccgatagctgtccttccgccaggctccagtgctcctccgacggccacgacaccacacgaagcgggtgccaaaacctctccggctgccacgacgacatgtacttagggcgctag

SEQ ID NO: 192649 - DNA, 383 bp, Arabidopsis thaliana landsberg
atggaagccataagagtttttggaccaaaacttggatctagactctctattcgttctcacaccactgcatttccggcatgcaaactctctcgctttccgctaacgtcatttcccggtaagcatgcacatcttgttcttttgaaggccactactattcctctggcttctgatgacaaagaaaataatcgcaaattcgaaaagttgggtccttctgaatggggcaatcaattcctttctgctcatgttgatctctcagtaagtctctgtctcttgccattatatagaggatatgaactcatgcatgtttctttttttaagatgaataccttttttataaggaaatggatgcgcttgagagagagattgaggcactaaagccgaaa

SEQ ID NO: 192650 - DNA, 93 bp, Arabidopsis thaliana landsberg
atgaccaggacctcgcaggccttatacctccactcggcattgatccggcatttttacatccatagcgcaaaattacccactggtggctaccgt

SEQ ID NO: 192651 - DNA, 369 bp, Arabidopsis thaliana landsberg
gtacggttattattgtcatagaacaactcagactgcgcccgcgcattgttaaggttcgacttgatcgcagcatcagcgcccttgtcgcgtgccgagttgagagatgcgagtacaacggatgcaaggataccgatgatcgcgatcactacgaggagctcgatgagcgtgaagcctcgcgtatgtgtgtgtttcgtcatagagaacagtaaataatgattatttgctccacgtagtgtggttacttaccattatagaccccaggatgagcagaatctctttatctggggacaagagaatgcctcgcatgtgtgcgaggcattcaaatgcacgctcggcattgaaaatcagatagatgctgtgatgttgtag

SEQ ID NO: 192652 - DNA, 127 bp, Arabidopsis thaliana landsberg
atggaagaatacatgcggttcagtcaacaagccgccaaggtcctagctcgtgataggagaagagcggagattgcaagaggtaagagagccatggcggaagagagaagcctcgtggatgaagatcttg

SEQ ID NO: 192653 - DNA, 475 bp, Arabidopsis thaliana landsberg
atgatcgtcgccaatgctgaggcacccgcaaatagtagtcgctcagaggttatcatcgcagcctcagccccgacccacgctattacgccacattgccgtcaatcacgagcacgacgtaaatattccacggcccacgagaatactccacattttcgtcagatcacgaggccgctgcaaataactacagtaccgacgcgggcatgcagccgacactattccgggccacgaaaatttacgtgtatcctgtagtgctcgattagtgtacctgttgtaaatattattgacagtagcctcaagtagggatgacaacgggtacatacccgtcggatagtaccattccatacccgtacccatcaaaaaatttctacccgtcggttacccatatatactcgcaggtataaaatcttacccgtacccgtacccatgcaggtatttttacccgtcgggtaacccgtacccgctaggaaagtcttaa

SEQ ID NO: 192654 - DNA, 1193 bp, Arabidopsis thaliana landsberg
atggatgtggctgtgagcgtcctaattaagcttgttatcgacatgtaagctctttgttttataatatgttatcttatcttatgtagtatgttaattaagatttttaatcattcttcctttataactgttgacaagcttatggcacaaccgttttgcaaaacctgttttttaggtatgtattggacgctagaattgctgctcctcttactttatccatgctcgaggtgtgactttcgacactcagatatattttcatgatatttatactgctactaacttttctagccatgcatgcaaatgtatttcaggaaatgctatgctccacaaaagcaccttgtaggattcgtgtatttgatttaattcttaatttaggagttcatgcacaattgttagagccaatgataagtgataatgcgactaccattgaagaagattatgcccaagaaacatatatcgacaatgaaaataggcttctgctacaagggacaagaacaaaagacttgcctaagatgtcaagcacttcttcggctattgagaactttgagtcttggatattaaaaatcttatttgaaatacttcttctcctagttcaggtgttttactctcttcttgcttctttgcttgacgtctacactagacttgtttgggattttataccttcaaaattgtttacgtaggttgaggaaaaggaagaatgtgtttgggcctctgccctcagctgcttgctctattttatctgtgatagaggcaaaatacggagaaaccagctaaatggtcttgacataagggtacgttagtattacgaggctgaatataatctttgccctctgctatgtggattattccttctttaattctcctcctattttcatttggatctgtcctttctctttgtttttagaccttcgtaactatgatttctgtttccagctgcatgttaccatttctcagccaagttgtacttgctgatgagccagttactttccttgaatcaggttataaaagctcttctgggaactagcaaaaggaattcttggtcagaagttgttcattccaagcttatttgtatcatgacgaatatgttttatcaatctccagaaccagaaggctctaacaaagcaatttcaagtgcctcaaattttcttatcgaccaggtcgatctgattggtggtgtagaatacattttctttgag

SEQ ID NO: 192655 - DNA, 316 bp, Arabidopsis thaliana landsberg
tgtgaagcttctttctcgcgctaccgcacgctgcacgaggataaggtgtgactggcttctctccatctcgacggcacggcggcacaatggtactaccagttggaccatgatctcggcatcatcacgtggccgcgctttgtcgaattcatcaacatgcgcttcggctcgcgcatccgctccaacgcgcttggggagttgaaggagctccaccgtaccggcacgctggacgaataccagcgccagttcttggctctcctgtgccgctgcgacaacctgacccggcagcaccaaatcgacttgttcactgccgggttcg

SEQ ID NO: 192656 - DNA, 153 bp, Arabidopsis thaliana landsberg
atgttcgggtacttgttcgcgtttggttcgggtttgggttcaggtttttgggttatgaagtttaggatctgcatggatattttgaacctcggtacgagttcggattcggatcgagatttatgggtcggatttgattcggttctttgggttcgg

SEQ ID NO: 192657 - DNA, 360 bp, Arabidopsis thaliana landsberg
acaccgaaaatggcttcgtctgcgccacagggatctgttgatcctctcaccgggaaagatccggcgaaggctttaactgctgttgcttctggattcttcgagaatgtgaagaaaaacaagcaaagcttcttccagttcgccgccatgactgggattttgcttctgagtttccgatcggtaagtcagaagtaccgaattcacgatctggaggaagacactgctgttctcaagaaggaacaagatagtttgacggatcgtatgagtaaaatcaaaagcgatcttcttcatcaagcatcgattgactcttccggcgtctttgcttctcgtctccgtctacttttcggtgaagataaaaagtga

SEQ ID NO: 192658 - DNA, 478 bp, Arabidopsis thaliana landsberg
atggatagcagcaacctgggctccgggagggagatccgttgggaggtacccatccgtaacgtcatcgtttgggatatgaactggtaagccagatctcgatgaattggatgaattgggatccaagatcgttggtcacaagtgatgtgttagtgttggtgttggaatgatctatttccgtgacggcgccaaatgtgggttttgaaatccacactagagatttgtatttaagattatgagaaaggagggctagatcttcactgaaatcttgagagttatattgctaagaacgaatggacttttgtattaattatgacaaagcttttacaatgtgaaaagagattacaagtgtaaaagtgtgtgtgtgcgaatgtgaactggattgaatgtctcttccaagtcgtccttgctcccttatataggtctacgcacgtggtagctccgtccgggatctgcggagatcctcctggatattcggcag

SEQ ID NO: 192659 - DNA, 411 bp, Arabidopsis thaliana landsberg
aagatctggattttcggatataaactcggagccaacctaggtttcgcgcatgcgagtagaggcttggccataaacaagttactgtccgctgaaatgagctccactgaacttttaccactagggagagtccattcgaacccttggataagcctggctaacaacatgatggttatagatgtcccaatcttagttcccggacagctacgccgaccggtgccgaatgtaacgaaccgcatgtccggttccatcaaagtcacgcccaatgacttttcgtcatggccatcaaggtgtcttgaacgcgttaggctcgtcccatattttaggattccgaccaagccccaaacgactcacaagaatttgactgcctatcattgcaaatttgaaatcgtacatatgccaatgttagactaa

SEQ ID NO: 192660 - DNA, 123 bp, Arabidopsis thaliana landsberg
atgaagacaaagtcacaaagagacagtgaaagtcaaaggaagaaaaaaacaagagagaaggaggagaaagaagaagaagaagaagtggttttttggaatgcaagtttgtttgttgtcttgtgg

SEQ ID NO: 192661 - DNA, 118 bp, Arabidopsis thaliana landsberg
atgtaccagtgtcaacacgttggcttagactcgatacacaaactaacacatgccgactgtgacacgttcccccagtggtattgggatggagacgtcaaccctagcggcatcaccacac

SEQ ID NO: 192662 - DNA, 103 bp, Arabidopsis thaliana landsberg
gggtgaaaggtttgtgaacctgcaggaacaaaatgctgaccctgctgtccaggtaccatcggccgaaactgctggaaaaaggtctcataagcacatccaatag

SEQ ID NO: 192663 - DNA, 284 bp, Arabidopsis thaliana landsberg
gcaatgaagaagagaacagattatctgataaatccaggaactggaggcttttgaaactgcctaaatcatttggcaacacaccagaaagggaattgtttgacatagatagcttgacaagctttgtcaagttggagaacagactgaaatcagcatcagcagtcaaacccaaattatccaaaacaacaccagccacattaccgccattgcagacaataccattccatgaagaaggacaaccattgaagtcaatagactcatcgttccatcaattaaggacaaaccct

SEQ ID NO: 192664 - DNA, 201 bp, Arabidopsis thaliana landsberg
aacaaaggaaatggattttcactctgctcaaccaagagattgcagagacaaacgcagagtttaaatagatttccgagaatgacagttatagaatcgataaccgaaatgtcgttaatccactctgatgcaaccgccggtatccggcgacaaacgctcaacggccagagacacggaggaaggacgaagggatgcgatcgttga

SEQ ID NO: 192665 - DNA, 111 bp, Arabidopsis thaliana landsberg
atgcagattcagatcctgccagagaagatgaagaagataaggttatcgattgatcaattgggatcgatcatggaggattatgcatctgacgtcggagtgatgaatgattga

SEQ ID NO: 192666 - DNA, 62 bp, Arabidopsis thaliana landsberg
atgctctcgtataatatcggcgataatagttggaggtttcagtatgtgaatcctgatttcag

SEQ ID NO: 192667 - DNA, 332 bp, Arabidopsis thaliana landsberg
atggcatataatatgttacgttataatgaattaatgatgatgatgatgataatgatgatgatggtgatgatgatgtgagtatcatacaagatgatacagagactgatcttgtcaatctcaggaggacaatttatcaaaccataatgtcaagtcttgatttcgaggaagcacggcatacgctgctcaagataagactagaacaaggtcaaggaatggagctttgtgttatggtgcttgaatgttgcactgaggagaaaacttatcgttccttctatggtcacttagcacactgggttctgtctcaaaagcagagtttacagagaatgttttga

SEQ ID NO: 192668 - DNA, 381 bp, Arabidopsis thaliana landsberg
atgaaaggtatgagagatgcgatgctcatgacgatttatgcttatgacccttggtagatcagtacactctttgtggagcatcagattgcattcaatacatatataaggattgcggtcgccttccacaccacatgcattacaagtaaatgcgactagtcttcccaagaggaagaggctatgcttgtggtgctttggttggaaaatagtgagtggtggtggatttcgcagacacttttcgtcgatgcttatgttgcatatcgtgcaacgagcaaaatgaaatcctacattttgttgacaataatggcattggtagtcgtcatcttcaccgaactgtccgaacctaccttggaaaatcttgagagagtgattacagcgagatga

SEQ ID NO: 192669 - DNA, 227 bp, Arabidopsis thaliana landsberg
accgaagctcctaaaggcaaagtgaaggcggaggccaaacaggctgaatccgaatccgagccagacgagaatgccggagacgagacgtcgagcgaagatgctgaagcgtctgaggcgagcgacgagagcgaggaaccgcaagttctatccgccccgaagcattggccggaagacgacaagaaagcgttcgcgaagatgacccgagagggtcaggagatcgcgctcag

SEQ ID NO: 192670 - DNA, 576 bp, Arabidopsis thaliana landsberg
atgaatgataactgcgatgttgttgtgatcgatattgatgacaccaatctgtaagtgttttgtttttcatttaacattttgtaagtttttaaactgttaacgttcttgttcttctctttatgtagattagaacaagatagttactacatgaagtatattgaagaagcaaagcatcagaaaagcatactaatacttgcactatattctaagcttagatcacaaggctattcaatggttctattatcaagaagacccgaaacagagcggaacgccacaatcgagcagttaaaatctagaggatacagcgactggtcacatttgattatgaggtttgcaataagcttttacaactactaattttattcacatcaaagtagcataaagccagaggttatattatcttatagcagggaagatacaagacaaaaggaagagttagaaagaggtcaccgcgtaattggagtcattggtaatcatatggatgtgttaagaggccagtggaattggcaaagcaagcgtctgttcaaacttccaagccttacctatgatgatgttttggattacaatgaaagatga

SEQ ID NO: 192671 - DNA, 339 bp, Arabidopsis thaliana landsberg
atggcggaagaatctttattaccatctcatacagaagatgtatcagcttctcctaataaatcttcatcacttctgtctgaaatatcaaatgcttccacgagaccttttgttcttgctttcactgttggttcttgtggtgccttgagctttggatgcattgtgagttcctaagttccatttttttgtaatccttcaatgttattttaacttttcagatcaacatcaaaattaggttcaattttcatcaaccaaataatatttttcatgtatatataggttggatatacagctcctacacagtccagtatcatgaaagacttgaatctatccatagctgat

SEQ ID NO: 192672 - DNA, 39 bp, Arabidopsis thaliana landsberg
atgagtggccgaacatgtgttgttcggaatctctcgcag

SEQ ID NO: 192673 - DNA, 669 bp, Arabidopsis thaliana landsberg
attacaattcggtttcctacccggtccaagcgatcaacagaagcttagattgggttaatcttatcgcttatgagttttatggtttgaccactgaaatcggtccacctgccgggttgtatgatccttccaaaaaaggtataaacataactaaatataatccctacgtagaaaaagtgagtagcttttgattggtcaagggtttaactgaaatagaatttggtaacttggttggtaggtccatgcggcgataccggtttgaaacattggcttaaggccggacttccggagaagaaagcagtctttggatttccatacgttggctggtcctggactctcgacgacgacaaggaccacggtgatgatgttgcggtcacccaccgagttgccgtgactgctaacggttcgatcaactatgatcagatagttaaattcataacggaatacaaagctagaacggtttatgactcggaagtggtcggatattactgtatcgctgggacaactttgattgggtacgatgatatccagagcgtcgttactaaagtgatatacactaagcacaaaggtctgcttggttactacgcttggaacgttggagctgacgatgtgtctcgtctctctcgtgcaggttcgtcttttgtacattccacaagggaaaccatattgtag

SEQ ID NO: 192674 - DNA, 184 bp, Arabidopsis thaliana landsberg
gaaggccaaggccaaaagcatacggagtgatatttcaagacgcgaacggagagttacacaaggcagagccagagaagaatccaatgaacgaggtgattttgcccgcgggggcgactgggagcccgcaatcgtcgatgctgagcggcataagtcccgcagctcatctcgcggctcacgggattaa

SEQ ID NO: 192675 - DNA, 162 bp, Arabidopsis thaliana landsberg
ctctcactagctcgctgtaatcttcatctatcccgaaatcggtggttctccgggatgatgcggaggaggagaaggcggcggaggaggagctccggcttcttggaaaaggagcggagacggaggcggaggaggaatattgagtccgagctgcgcaaccggtga

SEQ ID NO: 192676 - DNA, 337 bp, Arabidopsis thaliana landsberg
atgggcataggatactacgccatggccaatcttgcgtctggtgggactaacagtggttttggaatggactgcattggttccttatcctcgggagatcataatattggaattggtcccagagcatccactttcaccgatggagatgataatattcttattggtatgaatgcatacactccctccggcacaattagtaatcacgggaatatcaagggcgctattcacggcgtgtatctctcactaaacatggatggcgatcctaccaccaccactcaatcctcaaaggataattcgccaaaaagggccaccacagtctatgttgataatgcagtcagtg

SEQ ID NO: 192677 - DNA, 891 bp, Arabidopsis thaliana landsberg
atgcatctttgtgttatctacaaaatccacagagaatgtcaacaaaagaaaataaaaaacaataacctgttaaagaaaactccttacatcctgttcatggcgattcatttcatgggttatgaatggaatccttgtaattgtgcgttccgagatctgcagaaatttgtgagaaataatgagaaaaaatatcttatgaacattatcatgcaagcgactggaggtaaatgtcaaaaatggaaagcaaaaataaacaaaactatcttgatcatagtaataatcctcaccacagtgacattttgcattgcaatacctcatagatagaaacgaaaagctaagttgaagtaagagttttaagatatcagtcttaactacatcattctaactcatataacatacagcagtatcaacataaccagcataggtaaacattcgacaatcatagctcaacctacaggtctaaaagtttcgcgaacgcagactggaccacatacaccttgtgtaacattcttggaactccagtaagcaccgcaaaacgcgctatcgcatcccttgcctgcaataaactagagtcaagtgtgtatatatataattgtcagagattcctttcctactgaacatgtttaaatattagtctcttatcagtccaaccttgcaatacccagctctaagaaacatacaatattattctctgtattctaccagcatcccatttttttcccccagtttcgcagacgacatattagatatcattacataacatgtttaccaacaggaacagcatccattcactcggtacaaattttccgatgtagagcaattgaaagtaacaacaacaatgaacttacaatatcaagacgggaaaaaagtacagtaaccagtcttgagagctag

SEQ ID NO: 192678 - DNA, 514 bp, Arabidopsis thaliana landsberg
atgttacatgcatcagcgaaaagattgtcacaccggtccctcggatggcatttcttcgaggatgtctctgtgggctggccagtggacaacgcggaagatgaggaagaggacaaagatcggttccttctgcgggagctgaatctagctttcccctcggagggcctcagtgtggtctccggccggacgggatctggaaagagtctgctacttgcctcgattctgggtgaatgtgatgtcctccacggaaccgtcagagtgcctgttccaccgcctatcaaagaacgcttcgaccatctggcaacgagcgcaaattgggttctcgactcggctattgcttatgtggcgcaaattccctggatcgagaatgcgacaatcaaagataacattctattcggtctaccctacaatgaggagcgctatcgcaaaacactctttgcatgtgccctggaaaaggatctggagatgatgcctgatggcgaactaaccgctattggcgccaatggagtcaaccaaa

SEQ ID NO: 192679 - DNA, 229 bp, Arabidopsis thaliana landsberg
atggtggtgatgggactgccacctattggctgtgcaccatactacatgtggaaatacagaagccagtacttagaatgtgcagatgaagtgaacagcatgatcatggaatccaactttgtcatgagatacactgtagataaactcaaccgtgagcttccaggcgcatccattatctactgcgacgtgttccaaagcgccatggatattctcaggaaccaccaacactacg

SEQ ID NO: 192680 - DNA, 363 bp, Arabidopsis thaliana landsberg
cgatacgggcttctcttatccagtgttgagtcaggcgatatccatctttctgagtaccaagatgctaatggtgacaacatggacgacacagatgacattgaaaaccctgttgatggagaggaagatcaacagaatggtgcagctgagccagcttctgcaactgcaggtatttatgcacagtttgtgctcttcattttttctctgcctcacttaagaaagaatcataattaacatcatatgacgtagcaacagataatggagcagcagctcaaaagctggtgattagcgaggaagaatatgatagaatcacacaggctttagtcattcgccttagacaacatgaagaaactgttaacaaagaca

SEQ ID NO: 192681 - DNA, 234 bp, Arabidopsis thaliana landsberg
atgaagggtgattggaaataccttggttcacctgagaaagagccaccaaaagcggacaaggcggcacccgcagcagcagcggttgagacagatgcacgcaagatgtggcagaataagaccgtgaaaggtcagggtaccacggagagcgcagacgatgccaccgccgtctacacccagcatcagaacagcattacggacataaaaccgtacggagacacccaatggtcaaccaag

SEQ ID NO: 192682 - DNA, 73 bp, Arabidopsis thaliana landsberg
atgtcacagaaagtaggacctttcggtggtaacaaaggagatccattcgacgatagcgtttttggttacaacg

SEQ ID NO: 192683 - DNA, 278 bp, Arabidopsis thaliana landsberg
gaaggtttttcatgggacaaaggaattggatttcattcttcaatcttgctttcgacctctattccatttgtcggtcagtaggtgtgcgatgtcgggtaagcttatgcatgccttgttatgtaggcagctggtaacaaagaaaaagtatgagctgtggacagtatttggtggacacccaatgagattttcattaactgaatttgcttgcgtgactggattgccctgtgctgagttttctgaggattacgatccagatgatgattcggtctttgttgatg

SEQ ID NO: 192684 - DNA, 333 bp, Arabidopsis thaliana landsberg
atgtcaagtatggaacagattaaaaatactcacgaccagaccatggtatatgattcttcttcaaggagtatcaatgtctcaaatgggccagcaactttactgggaaaaaacaaagaagcaatgcaggaatttggcagaaaagatgagattcatacaggaagaaaaatagtatcacccacgcaaaaagaaacacttatttcccttgtaacttgtgaaagcaaagaacaacggagtattcaatgtgaattcagtggtcagaacgatcaagaaagaaagtcatctgtatttaagggggaaacattttgtttctcgcattcttttcctgaagatagg

SEQ ID NO: 192685 - DNA, 169 bp, Arabidopsis thaliana landsberg
gagattcatcaaagacttgagtagaatcgcaagaccattgactgctttactctgtaaagaagtcaaattcgagtttacacaagagtgtcatgatgcctttcagcagataaaacaagccttgatcagcgcacgaattgttcagccaccagattgggatttaccttttgag

SEQ ID NO: 192686 - DNA, 170 bp, Arabidopsis thaliana landsberg
gcgaaggggacaacgagtccccttcaaaatattattataaaatcaaaccaaattacaaacaaatacgccgtggatacgagatcccacgagagtcttcatcaaaaaaagatgagatacaatccggaaaagaatctagtaaatgcaaccctaaagggcatgaaaatgcataa

SEQ ID NO: 192687 - DNA, 716 bp, Arabidopsis thaliana landsberg
atgatttcgatttcgattccaatggtgagattctgtctctatttcgcgttcgtcatcctcgtatctgcaaatccgaaattaatcaattcgtgggatgagactgcgattagattcgaaccactgtcaccttctccggcgccggagccttccccggatgatgatgattcgtcggtttcatgtgtagatgacctaggaggtgttggctctttagattccacgtgtaagctcgtcgctgatttgaatctcacacgtgacctaaacatcaccggtaaaggtaatctccacattttgcctggtgttagattggtttgccagtttccgggatgttcgattagtgtcaatatctccggcaatttctcattggctgagaattcttcggttatcgccgggactttccgtctcgcggcggaaaacgctgaatttggggtaagctcggccgttgataccactggattggctggagaacctcctccggatactagccctatcgccggagggagtggaaggtgccggtggaggataccgtggaagatgttcatgttgtttgtcggatactactactaagattccggaatatgtgttcggtggtgatgtttatggttggtcgcttttggagaatccggagatttatggcgagaggacgtggtcctacgagtaatgacgttgattaccgcggaggtggcggcggaaccgtggcgatcgacatattagggcat

SEQ ID NO: 192688 - DNA, 47 bp, Arabidopsis thaliana landsberg
atgatgttgaatccaagctctcgtatagatcgcgagcaactttggcg

SEQ ID NO: 192689 - DNA, 787 bp, Arabidopsis thaliana landsberg
acacagaagagacacatgaatctgttgatgtatcacaagagaatggtgatgaggaagatgtgtgggatgcaaaaactaattttaccatcaagggtgattctgatgatgaggaggaaaaacctcagcctgtgtttaagaaaggtttaaaagacactgcatcaaaggcacatgattcaggtcagtagaaacaccctaggaagaagaacctcagcctgtggttttattatcttttgtctctgatttatctaatattttgggtttcaatacagttcctggcgcagatagaccaacagtgaagcctggaggttctggcaagccaaaaacagctgccaaaaaagctatgcctaaggtggatgatactacccggccgaaagatacttctaaaaaggatgaaggcttagtactgaatgaacttgctaaagaagtagaagaaaatcttcgctctccaatttgctgcatcatgggtcatgttgattctggtaaaacaaagctgttggattgcatcagaggaacaaatgttcaggaaggtgaagctggaggtattactcaacagattggtgcaacctttttccctgcagaaaacatccgtgagaggaccaaggaactgaaagccgatgcaaaactcaaggtgccaggtttattagttattgatacacctggccacgagtccttcacgaatctgcggtctagagggtcaaagttgtgtgaccttgcaattttggtggtggacattatgcatgggttagagccacaaaccataaaattttttaaatcttttgaaggatga

SEQ ID NO: 192690 - DNA, 239 bp, Arabidopsis thaliana landsberg
atggtactggcagcggaacaagaggttctcaaggaccttgaggcaggtcgggtcatcgtcgacggcgagcacgcgcatgccgacggggaactggtccttaggtcgtggccgccgctggcccttgcctgcagcttcagctcgtcgacggtcatctccggcggctccggctcggcaaatccaacagcagcgaaagccgcagaaccaagaaaccaagcacccggatcacccaaggccctcct

SEQ ID NO: 192691 - DNA, 602 bp, Arabidopsis thaliana landsberg
atcataaatgtgtacaatcaaaagtatgagagtgcgggtgcattctggccagacgttcatggacgtataatatcggcattgatcatctcacaaatccttttgttgggattaatgagcacgaaaggaaaagttcagtccacacctttcctcctcgttctagcgattctcaccttcggttttcatcggttttgcaaaggccggtacgaatcggcattcgtcattaacccgttgcaggttagctcaaaccaagatcgagcattttcggttaatggatggtagttttagctacatttgttttggttcagtttgtgttatttaatcttgtgagtaccggtttacaggaagctatgattaaggatacattggaacgagcaagagaaccaaacttgaatcttaaagggtttcttcagaatgcatatgttcatcctgtttttaaagacaacgactatgaagatagccggtttgatgaaatatccggttattgcatcgaagattcggatgaagagtgtgttactgtaccgaccaaacgtcagtcccggataaatacgcctgctgttagccatgcaagccacggttcttcgcgttcaccaccctcaaagtaa

SEQ ID NO: 192692 - DNA, 237 bp, Arabidopsis thaliana landsberg
atggccagtcccctcgtctccagcgagccctcgccgcgggaccgagcggcgccaccgcatttaggtccggcccccagccgttagatcttgggcatccatccgagatcgggcggtttaggtttcatcagtgcggatctgatcgcagccctccgatctagatccggccgctctcccctctccctctcacccatgcccctgcccctgggcccagctagtcagcccgccctgatacgatga

SEQ ID NO: 192693 - DNA, 55 bp, Arabidopsis thaliana landsberg
atggcgattatgctctctctggtactttgggcaagcttctttatcctttctacag

SEQ ID NO: 192694 - DNA, 118 bp, Arabidopsis thaliana landsberg
atgagttatgttcgggccgtaataatctttacccacatacacatttacgtacgttcgaattttcgattgagcatgttgttgacaaatggcagtgtattggaagcaaagcgaagcaaag

SEQ ID NO: 192695 - DNA, 2392 bp, Arabidopsis thaliana landsberg
atggggaagcctgaaagcttagacaaactaaagaatgttgtatgtggtattgagaattttggctgtggagaggagtcagaggccactgctttccttgttgttgattcacttattgccaccatgggtggagttgagagttttgaagaggatgaagatagcaaccctcctagtgtcatgttaaattcccgtgctgctattgtttctggggagcttattccttggcttcctggtttaggtgataacgtaaattttatgtcccccaggactcgcatggttcggggtttgcttgttattttacggtcatgcacgagaaatagagctatgtgttccacggcagggttattaggagttttgttgcgatcagtggaagcgataatttccaaggacgttgatatgaaatggaatgctgctgctattttgctactatgtattcaacatttagccgggcactcccttagtgtcgatgatttacacaggtggcttcaagttataaaagccgcaattacaacagcctggtcaagtccgttgatgcttgctttggagaaggcaatgagtggaaaggaatcaagggggcctgcttgtacttttgaatttgatggtgaaagctctggcttacttggtcccggagaaagtcgttggccctttaccaatggctatgcatttgcaacatggatctatattgaatcatttgctgacacattaaatgctgcaactgcggcagctgcaattgctgctgccgcagcagccaagtcagggaaaacatccgcaatgtcagctgcagcggctgcgagtgcgcttgctggtgaaggcactgctcatatgccacgtttgttcagctttttgtccgctgataatcagggaatagaagcatatttccacgctcaatttctggtggttgagagtggtagtgggaaaggaagaaagtcttcgctgcattttactcatgcatttaagcctcaatgttggtattttattggtcttgagcatagctgcaagcaaggacttctggggaaagcagagagtgaactacgattatatattgatggatccttgtatgaaagtcgtccttttgattttcctcgtatatccaagcccctttctttctgttgcattggcacaaatcctcctcctactatggctggtctacaacgtcgccgtcgtcaatgtcctttgtttgcagagatgggaccagtttatatatttaaggaaccgattggtcctgagagaatggcgcgtttggcgtctagaggtggagatgttttgccttgttttggcaatggggcaggccttccttggctagctacaaatgactatgtacgtaataaggcagaagaaagtagtattttggatgcagatattggaggatatacccacctgctttaccacccttgtctgctaagtgggagattttgtccagatgcttcactttctggagcagcaggtgcgtatatttatactccttttttcttatcaaatgctctttaaaagtgaaaacgtgcaattcccatgaatgttgatatgctatcagattgtcatggttgatttgttatgtactttgatttgcttattctctctatctgtggtcttcttttcccttcatgatttccttccgtcattttgtttctggtcgagaatcggaatcaatcatttccagttttgatatagtttgaactaatctttttgttttacttttttttttcttcgtcaaggcactctaaggcgaccagctgaggtccttggacaagtccatgttgcaacgagaatgaagccagtggagtctttctgggccttagcttatggaggacccatgtccctgcttcctttgaccgtaagcagtgtgcataaagatagcttggagccatgtcttggaaatcttccactgtctttgtccacagttacacttgctgcacctgtatttagaattatgtcagtcgctattcaacatcctgggaacaatgaagagttgtgtcgtactcagggacccgagattcttgctagaattctgagttatcttctacactcacttgcatcccttgacaggaagcatgatggagtaggagaagaggagctagttgctgccattgtttcgctttgccaatctcagaagatcaatcatgttctcaaagtgcagctctttcgtacgcttttattagatttgaaaatatggagcctgtgcaattatggactccaaaagaagctattgtcatcccttcaagatatggttttcactgaagcaacagctatgagggatgccgaagctattcagctgcttctagatggctgtcgaagatgctattggatgatttctgagaaggattctgagaccacttttcctcttgatgggaatacgcgtcaaatgggggaactcaatgctctgattgatgaacttctg

SEQ ID NO: 192696 - DNA, 375 bp, Arabidopsis thaliana landsberg
  unsure (1)..(375): unsure at all n locations
atggcggccgtccggcgcgagatcgagcgnaagtacgagtccggtacgggccgactgccggacctcaccggcgtcggtccggtcgccgccgtcgccgaccggggcaccgccgccctcgacgccgtccactacgacaccgccgacgaacgcctggccgccgccggactcacgctgcgccgccgcaccggcggcaccgacgcgggctggcacctgaagatcccggtcgcccccgacgtacgcgacgagatccaggccccgctctccggcgaggtgccgcccgccctcgccgccctgctccgcgcccgggtccgcggcgccgcgctgcgcaccgtgatccggctgcgctccacccgcgccgtccgccacctgctcggc

SEQ ID NO: 192697 - DNA, 514 bp, Arabidopsis thaliana landsberg
atggccgttgaatatcgaagccagattcacacaaatcttcttccttcaattatttcaacttctcttggcgtgagatttgaggtatgtatgtggatgtggtgttaagttaggtactctgttacgtttgttcatctttttattacatctcaagcaatcaaaatcaccaaacactttctttctttttctgaaaattgattggggtatttggcaagagattttcttgttgggaaaaatattgttttttttttgtcagagagtgaattataagtgagatcaataaattttgccccatttttaaagcttcctccttttaaatattttaggtcgcaactaaattggagttaaagtctgctgttgagattgttgcagatgagtttggtctgaatgtttggtggttttggatatggaccggaggagctggttatggcggagaaagtcatctgagaaaagtcccggcgaaactgagagtactggctctgtctcatctcactctgaaagattctctgacgatcag

SEQ ID NO: 192698 - DNA, 383 bp, Arabidopsis thaliana landsberg
gagcgcagattcgggttattcgtgatgtgtcggagacgttttgcacagcttcgggccagaaagtgagcttgtcaaaatcaaagatctacttctctaagaatgtttctcgcgaactagggaagatgataagtgatgtgagtggaattgcttctacttgtgatctggggaagtctcttgggatgcccgtacttcagaagaggatcaatagggagacctatggggagctgttagaaaagattgcttctaagcttctcggctggagggcgcctacattaagctttgctggaccgttaacgcttactgaagcagtgctaacagcgatgccggtgcactcaatgtcgaccattattctgcctaagtctatgctcacaagtctggattga

SEQ ID NO: 192699 - DNA, 532 bp, Arabidopsis thaliana landsberg
atgaagcacctcgcacgttgctcgcgcagcttcgcccggtttggcgttttacagtatactgcggcgctggtgaggggccaccggggggtgtacaaagaatgcgtcaagttcatacgagatccgacggcggaggagtgggaagattttctgaggacgggaaagaaggcctcccaatactcggaccgctccgcagaccgggagccgaaacccttgggctttgtccttcaaagcgaagtctcctgcgcgtggtagtggcggggcaggcaagactactacccctcagaaggctggacataaacgagctcgcaggtcgacagctttggcactacccagttgggtgcctgagaagcctctcacgagcaccatcttcgaaaccattcgcagggccgggcccgaaggggtgtcgaaccccgaactgagcgccgcaacaatcggctacggactccgccgctacacgtacaccagaatggcgaacctggtcaagacggcccagccctcgcaccttcggaagtttcagctgaagaggcagctt

SEQ ID NO: 192700 - DNA, 150 bp, Arabidopsis thaliana landsberg
atgtggaagctcatctataaacacatggtaacagagaaagaaggaattgattctgcaaatgctgaatcagtggcttcagttgaaagtgaatatgatgatgaggctggtggtcttcagattgatgcaagaagaagcggaacagttacactt

SEQ ID NO: 192701 - DNA, 107 bp, Arabidopsis thaliana landsberg
acaagagattacaaaagaaagttaaaaagaagaagacaagagattctaaaaagagagaagttgtgtgttttataacaaagatcgggtcttcggattttcctttgtgg

SEQ ID NO: 192702 - DNA, 112 bp, Arabidopsis thaliana landsberg
gttatttgcatttgacaagcccatgtggcttggcttgttcgggttactaaattatctcacgaacacaaagacactgaaacacaatcaacccaaactcaaaacacacccatag

SEQ ID NO: 192703 - DNA, 2426 bp, Arabidopsis thaliana landsberg
  unsure (1)..(2426): unsure at all n locations
atgatgagtgtgaaaacctgtaaagttgaggtaaagcaatttatcggtttcgcttttaaattgtttgttatcgaaaacttgttttgatatctctcatggcttttcttatttatgtgtcgattgctatcaactttgttacagcctttaaaatggcaaacaccacttagaagtagcaagaccaagcaggatgctaagccttattcgtgttcttcaccaccatccatcaaggcgtatacatctccattcgtgagccaaaaagcttcaagacgtgttgctttgtctgctgaagatatcaagaatgctcatagagaagcgacaaagatctccagtacgagctgtggatcaagcaaatggacaggaaatttcattctcattttggagcttcgaagaaagattatcaattttagaaccatcattgatcttcctcctctgacctattatctctctatatccaatgtacgttacctcttccctacgttttctttctttcagataatcgtatctttgacctaataaactcacagactaatcacaatgagaattttcttttagtttctgaggtgaaaagtaatgtgaattttccattaacaaaatcgaaaaaatgttatttgcataatgaataaagaatgtgaagaagttgtaactagctatatctcatcgtagcaattacaaaaaaaaaagatatcccagttcataagcagtgatcaaataggtaaatccagtgaaaatcgattccttggttaaaaaaaaaaacgcaccacttgatttgtgtgttagatatgactgatttgtggcgttgttgtttgttttctggatcaatggtagatggtgatgcgtacgatgaaagatctccataagctctgtcctgagatcattgacagctcccaaatcctcgaaatgagacgtgaagaagttgacaaggtttatacaaattcctctcataacttaaatccaaattgtgataatttgtttattctgatcaaaactattgcaaacagttgcttgacaatttctacaacgcttnnnnnnnnnnnnnnnnnnnnnnnnnngatgaccacgaatggatcatcaaatccaagtatagaagcagtaacataaggaagaatctgtctgatcgacttggtaacatatatcaaagtcttaatgattaatattaatattaaatattatatatcacaacattattgtaacaaaatctctatgcattgttcttgtagtggaaaaggtgttagctgcattagatggactgattaaggggatgaacgagaggcttaatacgacagagaacggcaatgtggaaatgaagaaaaaggttagtccgcggagtactaaaacatcaaatgaccgatcagaatcattggcgaagcaaccgatcaggccaaaaacggtgctgagtccaccgagtaaagtccatggagacttttcaatctctgtgtcaaatcttcctagaaatgtgagaatgcaagcgcttgtaaagctgagtcctatcgatgtaaagcgactcgctatccaaaattttagtcagaaagaagctctgagcaataatggtgatggtgatgatgagagtctcaaagtgaagaagagtgaaacagaggagaaagcaaaagaagctattcttgagaaacaagatagtgtgaagagtcagattgatgataaagattgctcaaaagtttcagtgaaatctgaaatggtttcaaaatcttttgctccgcctcctccaccacctccagggaatgcagcaatcccggtggaaccaccacttacaatgtctgctgaaaaagagtcgtatgctccgcttcctccacctcccggaagagcagcactaccaccgccaccgccacttccaatggctgtgagaaaaggagtggctcgccgcctcttccacctccagggactgcagcactacctccaccaccgccacttccaatggctgccggaaaaggagtggctgctccaccacctcctccacctggcgcaagaggaggcttgggagcgaagaaagtaactagtaaactgaagagatcaacccatttaggggccctatttagattcctcaaggggaaattagaagggaagaatccagaagtaatatctcgtggcgctggaggaggaagtaaaggcgcgactggaagcgctccagccagcggaaagcaaggaatggctgatgctcttgctgagataacaaagaagtaaatcacatctcacttcacttataaacaacaaaatggtcaaaactcatacttgcttaatggctacacaggtctccttattttcagaagatagaagaggatgttcgaatgtatatgacttcaatcaatgagcttaagacagatattacaaagttcaagaacaaggacattaccgagcttcaaaaatttcaccaccgtattgaatcagttcttgagaaactagaagatgaaacacag

SEQ ID NO: 192704 - DNA, 228 bp, Arabidopsis thaliana landsberg
gaggaggtggaggagcattaggcatcttcagaaagaacgaagtcgagagcagagagagtgagacttggacctggtcacggcccatcctcaccggcaactgccgcctctgctgcccgggcggcgctccacagcacgctgctggaccggacgaatgtacatctcgtgtagccgccggaagccgccaagcgaaagcacgacgctgcgaagcatctgctcggagaatccagt

SEQ ID NO: 192705 - DNA, 134 bp, Arabidopsis thaliana landsberg
atggtcccgatcgtactcctctcggcgtcgtatctcattctcatgtcgtcgttcgcgggaagcgttgatggagctccacgcatctcgccgactgttgatggcgtgtcgcagatcgctcgggggatgagcgaggg

SEQ ID NO: 192706 - DNA, 1671 bp, Arabidopsis thaliana landsberg
atggtgactgtgatttgtgacagtcatgtgagcggatattattgctcacgtcgtttagcggaagaccggtgagggatagatttgagtcaccgagtcgtgagattttaatgagggagcgtgattgcacgcggcgcgttgaggtgagattcacgagggttttgttttgaaaccttcttctccttctgaagaggtccacggtgggacctacgaaatttaactggggaagtgatggtgaagtcaacctcactcgccttttaagaagcgcgtggatgcatgtgttgttcgagcttaaccaatttcttggctagaccatcggttaaacagcaattagtcgtctgattaatttggatttgttcgatcgactagccatgtgcataactggtcggcaatgttatattagatgttcaatcttgttataacattagtagtaattagtaaaatggtgtattgattgtctaggttctaattatatcgtttaagatggttgataatttagttaggcgcacaattttaatatcaaacttaatcattttttagcttcttaaaaagaagcaaaaagcgtacagctatttttgtaaaatcatatgtataatttgtaaaatacaatgtttgtgttaaacacaaaaagatttgtttttgttgtaataatcaaacgtgttagtaacgtcagcgaaaaggaggcatttttcaggtcgctttttcgggtgatgggattttgaccttttcaattttgcccttaatcgctttggtctgactcttattgtggtttttgtttggtttgttttggttttacttttacccaatttttagacgcacgagtaacgtatacttgcaaaacaaaagagtgagatcacgtcactaacgttcaaaatcatttcactcgctggcaccatctcttatttattttaatttattcgagggagaaaaaaaatggttcaaagctaatgacctaatgttatcattatcattagagaactatccaagtgagaaacattcgtgaatccacttgatgttagtgggtgatttgttagttttaatagaacaacaaggtttgtttactttttatttttggctaataaagaagtggttagttgcacttaggggtttgactttggtaacatcgttggaatcttgataagggaatctatggaaaaatatataaacaaagaagtaaagcgtcaaacacaaagccttttgcaggtttaaagcagattcagatgtacttttaatgtattttttccaaaaataaaatggagattggagaagaagaagaagaagaagaagaagcgacgactactactcaaattgctcatgtgacttccactacttaacctcctttagaaaactacaaaaaatagttatcattaaataatactgtttgctagccggaacgttatagccaacacttgtcgggacccgtgaccgtggtccctaactttccactaccgttacatgaataaaagttctttatgtttcatagtttttatacctaggagattttattagtgttccatgaccatccaagatgtagtaacagttgatagtaagaagataaaatttgagtgttgtcactcgttaattagcaaatatcaagagatgcacattaaaggagcaaaccaggtcgagcaacttaacctaacatcagaacaaatacagctaaacagtaaataa

SEQ ID NO: 192707 - DNA, 47 bp, Arabidopsis thaliana landsberg
atgagctatcgacaacaagcggttccaagtgagatccgaccacctcc

SEQ ID NO: 192708 - DNA, 75 bp, Arabidopsis thaliana landsberg
atgctactagggtacaatggtcaccctaaatcatgtgaatgcaagtatgccgcgctgactaaaggcgtttccaat

SEQ ID NO: 192709 - DNA, 678 bp, Arabidopsis thaliana landsberg
tgattcttataccctgtataaggtttatgctgctatattgccctatgaagaggcatctgtgctctgtggtggcagtcttcctgattatatttccaaggtatttgcaaatagaaactctttccttgatttctaatgatttttcttccattgctcataaacctcaagtcagcttacagagttatatttttcatagacatatccttaaatgacggtagttcttgtagaagcagcagtgttgatctttagttatatcagaaatttgctgtcaattcacattgaggcagtggcttttctttaagtgatgtaattatatttggctttgttaagtaaattgtaaccattgctagataaaccattttctgtatcaattcctgctctgtctaaatagttatatatcatctatttggtatctatgttagtgaaaattttggaagcaccttagttacttaccataatgcagtgtctggttaatagtcagttaagcaataaaaaatggatagcaaagcgcatgtctctgagccatttcacttgccaacagttatgttccaccataggatgtctctgagccattcacccttgcagggcagcactccccggatcataaaattaggtgacagccccgggtgtccatgtggtggaacccatgtctccaatttatccgatatcataagcatgaag

SEQ ID NO: 192710 - DNA, 212 bp, Arabidopsis thaliana landsberg
tcttggtttgcgacctaccaagggagtgcttattcatggacctccaggcacaggaaaaacatctttggctcgaacctttgcccgccattctggtgtcaactttttctctgtgaatggaccagagattataagccagtatttgggtgaaagcgagaaagctctacatgaggtacccacatctgctacccatgctacaccagctgcggatagag

SEQ ID NO: 192711 - DNA, 147 bp, Arabidopsis thaliana landsberg
aaaagaagatgaaaaaaatgagaaaaagtgaggaacataacgaggaagaggaagatgaagagtataacgaagaaacggataatgaaagtaataataacaacgatcataagaaaatcgacaataaagatgacgaaaaaaatataaaaa

SEQ ID NO: 192712 - DNA, 230 bp, Arabidopsis thaliana landsberg
atgcgtaagcgttatccgccggagttcgaggcgttcttcaagcggtttccgtgcggcgatgcgaaggctgcggcgttcgtcgcgtggcagagagccgaagggttgcggccgccgctcgacgaactgatcgctgcgatcgagcggcgcgagcgctatcacgaatggctcgacgcgaaccgcaagttcgtgccgtcgtggccgtacgccgcgacctggctcaatggcgcacg

SEQ ID NO: 192713 - DNA, 327 bp, Arabidopsis thaliana landsberg
atgacccgcagcagaaagttcttaacgaaaaagatgttgaccgatcaaatgaatgaagcgagccaagatgaagacaatgttgcattgtcgaacaccaaagaaacggagaagaagcagaggaagcggaagaaggattgcgaggaaaagaataagaagaagcgaaagaaggattgcgaggaaaagcatgagacaaaggaaatggagttagcgtggaaacctgaggattgtgctaagccattaggcgaagtgagtaaggttactggcaagggaaaaaagaaaaaaagtcatttcaaaacattcacgtttcgaggcaaccaatatgcgctg

SEQ ID NO: 192714 - DNA, 408 bp, Arabidopsis thaliana landsberg
atgatcccctcccgcctcatcctctgcatcagcttcgcgccgagccgcaacctgatctgcgaagaagtgatcgatgatttgagtaatggtgcgattcaagggttccgcctggacagcagccggcatgcctacctttcgtcggcagacaggacacagatcggtgtgatctagaacccgcgccacgcacttttgacaaaaggtatggccgcagggagtcgtcagggggtccagtataagggagtaacaaacttggcaatctacttcggcacggagcctggctgtgagcttctcaaagcggatttgatcgtcttgctgatgtataaactcctctgcgctctccttagagcattcgtagacgacctccgtcgcgtcacagggaagccggccttcccaggcgagaagatatag

SEQ ID NO: 192715 - DNA, 520 bp, Arabidopsis thaliana landsberg
atgactcccgaggaagtaatcgggaattttgtgagctttgaatgtatgattaaaggctcaaagaagatcaacgagcttgacgaaccctccacgtccgaagcgcaaccagtggcatttaaggcaacagaggagaagaaggaggagtctacaccgagtagacaaccaattgacgcctccaagctcgacaatgaggaaatggccttaatcatcaaaacgtttcgccaaatcctcaagcaacgaagggggaaagactacaaaccccgctccaaaagggtgtgctacaaatgtggtaagcccggtcatttcattgctaaatgtcctatgtctagtgatagtgataggggcgacgacaagagggggaagaaaaaggagaagaagagatactacaagaagaagggcgcgatgcccacatatgtcaagaatgggactccgataagagctccaccgactcctcctccaacgaggatgccgctaacatcgccatcaacaagggcctcctcttccccaatgtcggccacaa

SEQ ID NO: 192716 - DNA, 564 bp, Arabidopsis thaliana landsberg
atggacgggttgatcatcgaacgtattgagggctacgaagacggacgacaccgcgctcgacaaaagcggctacatctggcggccgacacgatgtccgtcagcaccatggatgcacgaccatgcgccacagctacaaacccgaacagatacgtgccctgctgagggcggcagcgaaggtgaaggttaccgatatcccgggatacttcggcatctccatcggcacgtattacaactggcgacatcggtttggcgatgccgacgatgcaagcctgcggcgccgtgtcccaaagaagctactccaagcggccactccgcaccatgcggcgttgtacggcatctatcgacgcgactacaccccctcgcaagccggctggcaggtacgcatccatcgacgcggccgtatcgtcgtggacactcgctttcgggacaaggatcacggcggagcggatgccgcgcttcgtgctgcgcaggcgcaccgtgacttggccattcgctgtcacgctcccatgccgctacgcgaacgcaaccagatcctgcgccgcaacaacacgacaggcgttcccg

SEQ ID NO: 192717 - DNA, 418 bp, Arabidopsis thaliana landsberg
attcttcctgacaaagtttctactgatgatacatcggaatcttcagggaagaagagacctttagggaatagagaagcggttagaaagtatagggagaagaagaaggctaaagcggcttcgttggaggatgaggttatgaggcttaaggcggttaataatcagctgttgaagaggttgcaaggtcaagctgcattggaagctgaggttactaggctcaagtgtttgcttgttgatataagaggaagaattgatggagagattggtgcgtttccttatcagaaacctgcggttacaaacgtgccttactcatacatgatgcatccttgcaatatgcaatgtgatgttgataacttgtactgccttcaaaatgggaataatggaaaaggtgcatcgatgaatgagcaagggctctatggtt

SEQ ID NO: 192718 - DNA, 315 bp, Arabidopsis thaliana landsberg
ttatgttttgatacctttcatggaacatgtcgtactcatgtaatgctacctgctaacaagtctatggagaactatgtgattggtaaggcagatgagtgcgttagtaatgtggcgatgggtcaagttaactccattgatgaagataagtttgtgggttttattgagtctagtgatttgctactagcaaggatattttggttgttgattctcgagaacatagctaggctatatcttctcaaaacacaccttaagcaagctgaaaagtacaaggagacaacctatgttctagtggaaacgtcattcaatggagctaag

SEQ ID NO: 192719 - DNA, 260 bp, Arabidopsis thaliana landsberg
atgacgggttgggcgctcggcctactgcccatcgcgctgctggcgctgaccgggtgttcgctgaatcccttgcgccacgcaacgcacgggcgcacatcgacagcatcggccacgtgtcgcgacaacaccggcgccacgcaatcgcagcgctactgccagcgcaacgattccagccccgacatcgccggaatcgacttcagcaagattccggaaccggtgccgacggtggaaccgcgctcgcgctacggcaacaagtcgcc

SEQ ID NO: 192720 - DNA, 1682 bp, Arabidopsis thaliana landsberg
atgggagggtctcacaaaaggatacctttgcgtgattctacaaatgatcttcctcttgattctacctctatcaataaagctcccagtccacaaaattgtttagacaccagtaaacaagacactgatgagattctacccattccacgaacgattggcctgcacttgaatggtttcgtgaacccctcagtctcaagtggccgaaaaaaaaaaaaaatcaaagatggtcaggcttttccttctacaacatttcattataatattgaagatgaattctcaactcctgtctccacaaaaagagatttggtggtattcagtgatgtcaaaatcatggagcctcctgagagatcagtggaaggagaatgttttgaccaactcatggcaatggaaaataggttggaaaatattcgatgttcctaatcttgtccagccatcaactattagctatgaatacaaaacttatacttgaaatactgattaatgcaggcaattgtctcaaggacttgccgaacttggcagctgtaagcgctgtaaatgtaggaaatcacaatgcttgaagctgtaagctctttccttacaatcattccctggacacaattttcagatgccaaaaacgtctgtttttctttaaatgatatggttaggtttttattcccacttttctaaaagctattgagtcactttcattggatactactttcaagtgaaccagatgatgtgtgaagtctgttgcagatgttgttctgtctcgctgaaagtgcagcattgtcagcttctatgttccagaacttttttatccaaaagtttatacctttttcttgtccaaaaagctcataccttttctgcaactcagcttaagttgttaaatacactgaattttaggttgtgtagaacatagacaccaacccgtcgttaactacatattcatatctttgctgtacaggtattgtgaatgtttttccgctggtctattctgtggtgaaccttgttcatgtcaaaattgtttcaataagcccattcatgaagacctagttatgaaaagtcgtgaagtgattaaagcccgcaacccattagcttttgctccaaaagtggtctcaacttctgatactgttatagatttatgggtaagacatatcatgagatcaatagtgagatcaactacataatacagaaaaaaatagacttgtcctgattcgctgattaaagtatgactgcaactagatagtactgaggattttttttttgtctcatgtttatattacatctgtaggtcgagaacagcaagactcctgcttcagcaagacacaaaagaggatgcaactgcaggaaatcaggctgctcaaagaaatattgtgaatgctttatggtaactttggtttcacttatccttcttcgttcgcacttaaattttgaataatgtcattcttctgaaccattggatgttactatgactttatcaagatgggcgttggatgctcctctaactgcagatgcatgggatgcaagaatacttttggtcacacaaatggtaagctttcaattatctattgccctttcattcttgtacagaagcagatatctctaagatagtttgcattgttctcagagcaatgtgcgggagattctgatgtggtaacaatcaatgatgaagctaaacactatggtgatcatggcgatgcttcaag

SEQ ID NO: 192721 - DNA, 126 bp, Arabidopsis thaliana landsberg
tatgaaacaaccgtcgaggaacgacggaaggttgacgagatgacggccaacgaagacggtggcagtagccggcctggtggcggtgctggccctggtggtcctgttcctgacgggcaccatcaagac

SEQ ID NO: 192722 - DNA, 351 bp, Arabidopsis thaliana landsberg
ggcctcaaccagtcggcgagcggcaccgacaagaacgccgcgttgatcaacctgccatctcgccacgggccagatcggccgcccgggcgcgggtccgttctcgctgacgggccagcccaacgccatgggcggccgcgagtgggcggcatggccaacctgctgtcggcgcaccgcgacctggccgatcccgcgcaccgcgcggaggtggccgcgctgtggggcgtgccgtcggtgcccgcgcggcccggcaagacggcggtcgagatgttccaggccgccgccgacggcgagatccgcgcgctctggatcacctgcaccaacccggcgcagtcgctgcccgaccaggccacc

SEQ ID NO: 192723 - DNA, 187 bp, Arabidopsis thaliana landsberg
atgttttatgaagacaaagatttcactgtaaagattgaagaagttgagggtgaactctttgtccacctaactctctggaaggccagtaaggaaattctagaacgtgtattgaaaatctgggcagagcttaaggtacgagcatggttggatggatatgatgaaatctccacctacactaaagatgaac

SEQ ID NO: 192724 - DNA, 579 bp, Arabidopsis thaliana landsberg
agttgtcattggactgtgtcgaatgctccactttccttggctatcgtggcgccaaacctgcttgaactgaagctaaaatgcaacaagcctaaatctcttctagttgaaacgcccaagttggtgcaatgccatctttctgtggaggacgctgaaggtgttagttttggggagtttcaagatctgaagactttagagctcgtatctcctgatatgtacagattaatcagcaacatcagttttggcaacaagatcaaaaagcttgcagtggattcagtaaagtctatagaacaatctgagaggttagaacttggactggcaacaatcctcaaagcattccctggcattacttctcttagtttgagtcccaggacttggtcagatatcgaaacacatttccaaagccaaggcggcctaggtgatatgaagggaacagacagcctgaagcaaataacagcacgtgtacagatgtcagatcataccaatgttcatcaaacagtttctttcatcaggtctattgttaataagtacagaggtttgacagacatgagactgatgattcaccaggacaaagatcctaga

SEQ ID NO: 192725 - DNA, 57 bp, Arabidopsis thaliana landsberg
atgtgtcgacaggtacgatttgcatctagtaaccgatgcaatgcacatcccgcacat

SEQ ID NO: 192726 - DNA, 421 bp, Arabidopsis thaliana landsberg
atgcgtgaggacagtgatcctgcattgcccacagaaagcaggaaaatatacctgtctgtacttgaccaccagcgccagtggctgctggcaaaaaaccgtgcggagcctcattttgatgaagacatcatccgcaaataccttcaccagatagatattgaagaggagaaactgcggtttatgtaatacgtctgcggtttaaccagtctgtacgccaaacaggtatcctaccagggctgtaacgcccatggccagcgtgccccagaagcagatgcgcacaacggctttccctggcgatgaacctcctgcccttgcagcgatcagggcggataaggccatgaagacaatgaaaaccacatactcgcatattaccatggattccataggagccagaaatgctaccagcaaaggcagcaccccaccg

SEQ ID NO: 192727 - DNA, 1328 bp, Arabidopsis thaliana landsberg
agcttaagagtcagatatcagaatggtgcgcgaagaacggtcttgatgttcaagatccagcgaggaagcacgtaaaggcttccaacagtatcgacttctctgtttccatcgctagtttcggaagttctctgtacaacatccctgatcacagcggcatttcgattacggatttcaactcgagctattccattgattcgtcatcctactctaagatgtcaaagggtggttacttcactccaatgcagaggatagattctgcttcaggcgctggtgacacagattctagtcacagcgagattgagatagatcccttgtgtggactcacaaaccttccatgggatgcgcagatcaaagtcgtcgaagatgtaagaagtcgttttgagcacagtactcgtgcttttcggtctatgtcaccgagtaaatttcttgagccacttatcacatatttgaagaatgctctcgaaagaaatggcaccgctggagagataataaagggtggattggatttgttgctggctttccttagcggaaataggagagctatagaatctttggaagaagaggttttcaaaatgttctcagtctttcttgagtctgaggtagtagctgaagaagctctaaacatacttgacgttctgtcaaaccatccgcacggtccgtccaagataacttcatcaggatctctttcttcccttttgaagatcgtagagtcccaagcagaacatctccaagaacaggctatgatcacactcaagaatctttcatcaagcatggagatttgtctggaaatggtatctctcgatttcatccagaagctcacatctttcttgcaacaaaaagttttctgcaaacactcgattatcattctgaaaaacctctgcagcaccgagaaaggtcggggttgtatcaccgaaaccccggattgtttagcttccatagctgaattactcgagtcaaatgttcccgaggagcaagagaacgcaatctccatcctccttcagctctgtgtgcagaagatagagtattgctgtcttgtcgtgagagaagcaactgatatttactcatctctaatcttgatatccaacaatggaacagaggaagtaaaggtgagtgcatcagaattacttagagctcttgtagaagtagattccgacaaagaagaagaagaagaagtttcctccagaccagaaggaagaacaactgcttcgcctacttcacaggttgttactccagttactcatccggaacctgttaaaataacaccatctcccaagaaatctggtctttttggattcaatttctccagtctcaagaagaagaaaaaatag

SEQ ID NO: 192728 - DNA, 118 bp, Arabidopsis thaliana landsberg
cgaatgcaacctaaactgccttctccgcataagggagtggtggccatcattgcacactcagttgccacactcagaaaccactcgcaccagagcccgaagagtgctatgctaaagagcc

SEQ ID NO: 192729 - DNA, 657 bp, Arabidopsis thaliana landsberg
atgttgatttcattcatcgaatcagctctttccacatctaggcttcgtggtaagagttctttataccattctcaactaatcaatcgcctataagcaagttacaaggagatacatcaaagggtcgggttaaatttattctgtgtatatatcttgttgttgatgtaggaaagaatacgaacgtttattatgagtatatacaattaagtcaaggaataagccaaggtcgtgtagaaatcgtgaaggacttcttgaatcatcatccggactcagtggacgaatggataaacctttacgagacgccattgttaaaggcttgtgcgtgtgggaaacccgagattgttaaagagcttctacgtcgtatgacacctgaacaaatgcttcccaagatgagccaaaacgcttcataccacacgcctctcactgttgttgcggttagtggaaacatggagattgctgaagccttagtcgccaagaaccctaagctgctagagattcctggaatcaatggacaaattccggttgtggttgcggttgagaatacacagatggagatggctcgctatctttacaccagaactccggttcaagtgttacttgaccaagatgggtatcacggttctttgctctttctcaatgccatcttctataaaatgcttg

SEQ ID NO: 192730 - DNA, 945 bp, Arabidopsis thaliana landsberg
atgctcgatcttggggatcgagtaatgagggtgctgcaaagtcggcgcctttgtgtctatgctctgagtgatcaatttgatcgagtagatgcttcttcctctcctatccgtatgctcaaatgtctggttgagtggggaatgaggaggatccgaagacgctttgatagatcaacaagtcttgtagagttggtcacccttggtcgagtaaatgggtcgagtagaggatcgagtaagaagggcgactagagtctactgcctcctctttagcagcctggatcgagtaaactggtcgactagaatgctctactgctaccctcctcttgtttccctctggggcaatgaataactggtcgagtagctactctgctgcttaccctctggggcaattaataactggtcgagtagctgctcctctggttgccctctggagcatacattaactgaattcagcagttaatgatttttgactataaaatcaaaaattcagttaatgtataaaatcaaaaattcagttaatgtattcgagtaaagagtataaaacattcagttaatgtatttgagtttttgactatttactagtatttgatttttggccgttgatataactctctttttattgcttttaactatattttaggtataggttttagagtttatttgttatttctagagtcttttctagtccttttcaggtctttacatgtttgggactcatttgaagattatggagcattctggagatcaacatacaacttcagctgcagaagcaatgcggagacgaaaatgcacgtaggtgtcgaacgacacaatccctggtgtcgagcgacaccaatacctgacggcaatttcgagacgcaacttattgatgttttgaagatttccaaagtcggcccagaactttctcctatgtttaatgaaggcctagcacgtgttttagacatataa

SEQ ID NO: 192731 - DNA, 250 bp, Arabidopsis thaliana landsberg
agtatgtgtgttgtgtctccgatttgagtttcaggttatatcaatgaaggagtgcttgagtatcaaactcagtcaaaaagggggagatggaagatgcggagtcaatcaatcagctgatggcgatctgagcgttgatggatttcaggacgctgcatcgggtttcatcagacgcttgatttgtagacatggatgcgagagcaaacgtggcaagctaaggcggatgatgtggagagccaaggatggaagctga

SEQ ID NO: 192732 - DNA, 633 bp, Arabidopsis thaliana landsberg
agcctttggctccttctccatcaacatcggcatcaacatcaacagtcacagaacatggtataatggctgttcaatcgtctgctggtacaattccttttccttcatcttctcttcgttttgaaaatgaaaaactcactttccagcatcaatgcctttcttctctatacacaaatcttcctcatggtagttggataattgatagtggtgccactacacatgtgtgttctgatctagcaatgtttaatgaaactaatacagtttctggagtaactgtttctttaccaaatgatactagagtgcagatcacacacacatgcacaatatcattatcgcattcactcattttgcatgatatgttacatgttccttcatttaaattcaatttgatttatgtgagtagtcttttgaaaacaaatctttgttcaactcatttctatgttgattcttgcattattcaggagtttattcagggattgacgattggtagaggtatacttcttcataatctctacatattacaacttgatagaccatccacacatgagcagttttcgggatccttgatagctgatggcattctttggcaccaacgccttggacatccatctgctgacaagttacaatgcatttcgg

SEQ ID NO: 192733 - DNA, 852 bp, Arabidopsis thaliana landsberg
atggctttgtggttgggatcaatcgacctcacccaaagggtttcaaaacgcagaaccagagttcttggtttttccaagcatcatgtctttggcttcattgatcttagacgcaaggtaatggcttcctcctgcatctggatgattagccaccatcactctacggtgagcttccttcaccttctctgccgctacactctccctattcaaacaccacaagtgacaaactcatcaagccataataatgtcgcaaaaaccaccactaaacatatgcaaaccatttacccttgtgtaagaacatagtttggcccctatgcaaacttgttaaaaactagtgtggcatacctactgcctataaatgatcatttaccaattctaccaaaaatgaaagagtcagaaagaaactcccctatgactagccaaagatgaagatatatttaagaacaggaggagtccctcgaggaggactagtgtgagaaaccataccgcctatttcaaatcatttacacagcggagactttacaaaactagcagaagagaaaccttatttaaaacaaaagtcccaagaccactagtatcatttgtagtgagaggctaaactctaaagacagaaagaaaggtacctaacaccgagaattagagcagcttctcttcgattcatagtagcttggaaaccaccttcatagaattttcgcattctaggcctaactggtctcagcttaaacgcttgccatgcctctattccatatttaccagcataagcagcagcagcaacagcagcgcctccaattatcgctgcaacctggagagcatacgagaagcgaagaatattattccatacgtcagacaagatga

SEQ ID NO: 192734 - DNA, 15 bp, Arabidopsis thaliana landsberg
atgctcctatggaag

SEQ ID NO: 192735 - DNA, 1276 bp, Arabidopsis thaliana landsberg
gcttatgcttcaatgttatatctcaaaaagttcaaaaacttcaaaattataattcggggaatccctgtggagcagttcaacattgctgatggattcagatttcccgagattattaagtacaagccccatacagctacaacggaacaagtgattcctttttttcttttctactctctagttttgttatgtggagctttggctaattgttttgctatttgccgttgcataactgtttgtgttttcatatgcaaacattaatctagggaatgagaaaaaaaaaacactaggctttcttgttacaggcttccactgaaatcaaaattggatttgtaaaggaggcacctaagcttgcaatctgcggtttcaatgtgtatcacaaaaaccgtctcatccgggtacgctttcatatagcagacatttgcatgatctagataatctaaagaagcatctgtagtaagattgttatttgacaattcagagaaatcagcttatttacaagaaagacatgctcaatagaacattaaaaaaattggtttgctagcatacttgttacttaaacattaaagaaaggctttgaatatgccttgattaagtttagatctctctttcttgcaccattacagcctttctggaaggtcactatgggaggggactcgacaggccacggtgttgtgggtatattgattgatttcctttgtgatttcatggactatattttgtttgacgtaaagacctggctgaagactcattaaccaaaatctgttccccaggagttcttgaagcaaacttcatagaaccagcccacgataagcaagattttgaaaggtcttctctatttcagcggctggaggcgaggttgaaaaagattgtctatagttactggtctcttcgttctctccaaaaccttttcaaataattttgtcaatataatctttgttccaaatcgtaatatctttggttgactcttccactgcttgttatggagaaaaacaggtatagccactgccaccttttaggataccataaatatcaaatgcctgcagataagtcgaaaaagatagcaatacctgatcaacctcctactatcagtacagtcaatccttcgcctttgccttctgataaaattagtcaaggtggccctataatacgtgaaatcaatcttagtaacgccacctcaagccgtacagttgcttttgcttcgccacatttgagaaattccactggtttaagaagtaactttcaacccgtgcagctcaacccacaacctacagctgcc

SEQ ID NO: 192736 - DNA, 45 bp, Arabidopsis thaliana landsberg
atggtcgtcggcgccaaccgggcgaagggcaatgattcgattacg

SEQ ID NO: 192737 - DNA, 257 bp, Arabidopsis thaliana landsberg
gaagagtttgggacgttgaagccatggtatgatcatataggaggcgacgcaattggtttaacatggaacaaacacaattcaaaggtaaacaaaaatcttcttagtgtcttacttaaaagaaacactaaaggaaaaatcgtaataacaaatgtaatgtttgattgcagaaacgagaacgagatgaagaagaagaagaagaagaagaaagtaatccaatggagatgttaaaggcggtaggcgaaatgggtaaagggtta

SEQ ID NO: 192738 - DNA, 178 bp, Arabidopsis thaliana landsberg
atggcatatgacgacactggacatacagacatggccaagatgggtggttcgtggcttcgggttgatcgacgaggacgttggtcttctaagggggtggattatgatatcctggcgtcaatggatgctgatattctagcccaaagcttaatagaattaacagagtactcatacaaacaag

SEQ ID NO: 192739 - DNA, 133 bp, Arabidopsis thaliana landsberg
gtacccttttccgatctttcttctccgatcatcctccggctaagaataatttttgatgcagaggaaaagaagaaacagaggaaggataagaagaagaaagtgaaatttgcagagaatgtgaaaaagacgaaag

SEQ ID NO: 192740 - DNA, 87 bp, Arabidopsis thaliana landsberg
atgatgatcgaatctataagcggcggcgagtcgagttgcgccgacgggtttcgtggagcacacaccggctgggtaaatatcggtgta

SEQ ID NO: 192741 - DNA, 1046 bp, Arabidopsis thaliana landsberg
atgagaaattattacttatgcatccaccgtggtaaacgtggtccacgaaacgtaggcctgagttcccagccatgtaagccttcaagaatattagccttccctgggagaagggtcaacagaagagctgatactccatttatgcacctcgcaatgttattcaaagactcatatgtaacagtttttactgatctgcactaaaagccaaaacataatcaaaaagcttatttagtttaagcttgttagacaacataagggaaaagaagaaaatctaacaaaaagacgaaccaaaaaaaaagaaatagtcatttcaccgactcaaagttcatagccaacatcaactctaaaagacgaagctttgaatgaagatactagaataaaatggtctaacaaaactcaaaaacacaatctaccaatactaattaacaaagagacttactataatcaccaaacgatcaaaaacttaaaaatctctacttgtcatttatgaaacattagaacaactataggcgcatacacagatgaatccactgatgatcgataagaaaaaagactcactctttggttacagcgagagcgttgtccacgatccgttgcattgcttttttctcaaaaatcagatttttttgtttttttggaaatatcagaaaatttgaaaccaaaaaacaatctgattcgtcgccgtaatccgaaaattatcgaggaaaacgacaaagagaaaatttcttatccacctgagaaaacacaaaatttagccagaatagaaatctctcgatgctaggagatattggaccaaatcgcgatcgagatttaatccgaactcaaaataaggaaaacacagagacccacaggagccgcgattcgagaatcaaaaatctaaaaagaaaaaacaaaattggagagaatctgacgaaaataaaataaaaatgggagaatccgattaaataggggcacgtcggcgattcttgccgtccagagaccagaaaatggtgacacgtggacatgtgttattggataatgacgaatgtgacaaaaactacgacacgtaa

SEQ ID NO: 192742 - DNA, 135 bp, Arabidopsis thaliana landsberg
atggaggagcagctcagcccgctggccgtgacgcacctgctccagcacacgctgcgcacgctctgcggccacgacgacgcgcagtgggtgtacgcgtcttctggcggatcctcccagaaactacccgcccccaaa

SEQ ID NO: 192743 - DNA, 298 bp, Arabidopsis thaliana landsberg
tcacaccgtctataatagcttcaccaacaccttcgccaagaccatcgataataccaccgagaaaatcaatcacaacctgcgacgccaaccttgccgccgttcccaaaactgccggagacttatccctccctttatgtccgtttgctcggaggccattcacggcggcgtctttggcacaaacggcatgcaagtggtaatcacagacggtgcaacggtaaaccctccccgttcgcttacctctcttgcactctccgcagaggaatcctccggagtctccgccggtggtgctacctgctga

SEQ ID NO: 192744 - DNA, 232 bp, Arabidopsis thaliana landsberg
ttccatcaaaaggccggggacggaccccggagaaaggaattgcatgaatacattgccgcccgtcgatgccgttgaacttcgccgcgccagcctgtgccagatcctgcattggctggcactggagcgcaccacgccgcaggcgctggccgatgcctaccgtgaggctatcgagcggctcaatccggccttgaacgcgtttgtcgattcgcgctcgggcttgctggacgagcag

SEQ ID NO: 192745 - DNA, 158 bp, Arabidopsis thaliana landsberg
atggtcgctgaagaaactgctgcagccaccgaagagaccacggctgccaaacccgagaaaggaggaataaccgaagatacctcggaagatgaaacttttgacttccgaaacttagttggccaggagctgactgaagctgaaaaagaggaactgaaaga

SEQ ID NO: 192746 - DNA, 302 bp, Arabidopsis thaliana landsberg
atgtctctctaatgaaaaaccacatgaacccgatacctcgccaatggagacacaacctgatacctcactaatggagacaagaaagtccctggatatttctgagaagacaaatagcggatgctcagtagaggctgtttactctggaaacttttcagttacagttgctgatgacggcgagacagctcttgttgtatcaatagtcaaaggagacgagtctcatatgggaccaagtgataccaacccattgccagttcaagctaaaatggatggagacccagatagttcgcatcttataattcttt

SEQ ID NO: 192747 - DNA, 144 bp, Arabidopsis thaliana landsberg
atggccgtcatcgccgccgtcgcattgctcccggcgaccgcgtcggcgctgacgtacatggtcggggacgatccggctgggacgtcgggccggactacgacgcctgggccagcgcgaagaagttcaaggtcggcgacacgctcg

SEQ ID NO: 192748 - DNA, 102 bp, Arabidopsis thaliana landsberg
tttcttcaatcggaattggatccaatttcgaaagttgatttagaattgtcaaaaagaaatgctaaaagccgcacgatgacaaatccgagacatacgccataa

SEQ ID NO: 192749 - DNA, 298 bp, Arabidopsis thaliana landsberg
ccccaccggccaggcccccctccacaaaccacctccgtgctcacgctgctagtaagacgtgcctagcaccttctcgtgtccttgagcttttcaaacctcctccccacaccctctcgctctccaacaactaccgcatgctctcgccgctgcctatagcctcgccgctccccagccacctttgactgcggcggcctcgccaaccacgctacgtcgatgcccagctagtcgattgccgccccaaggaaagccatggtcgtctacccccttctcttccaataccctcgtgcgagacgcctag

SEQ ID NO: 192750 - DNA, 258 bp, Arabidopsis thaliana landsberg
ctaaattcaacattatgtgtaccatcttgaaaattgatatagattatggtaggtatttcttgtgttgtctaagtggaacaagacaacataatgtacccacaattgaaaatgatattgtcaatcaagaaaggtaagaaactaatgttttggtgtccaacatgtaaagaagacactcctaaggttgtaccaaggtaaactacttaccatttgattttgtctctaggtacatgttaaaccttgcattgatagacaagaaag

SEQ ID NO: 192751 - DNA, 755 bp, Arabidopsis thaliana landsberg
gtttctttcacaacaacttatcctttgatgacaagtttagactagttctccaagtttgcaacaatgctagactggatgatatcacaaggcaactacccctatggatcctatggcgaatttggaagagcagaaacttgctagtatatcaaagaagaggcagttcatggagtgatgatatacaaaaggcaataacggacgcatgtgaatggttaccaacacagagtgaattgatgacaagggctggccggggacatatgcaatacggatggaagaaaccaaatcatggtttcatgaagtgcaattacgactgcagctaccgtcaagggggactagacactaacgctggatggatcatcagaaacgaagctggaacttttgttatggctgcacaaagtaaaggtcgccaatgcaactcggtcttagaagcgaaacaacaaggtttattaatggctatgcagcatacttgggtcagaggatacaagaaaatcatattcgaaggtgccaatagaagtgtggcagagtgtgtcaatggcaaagctcgaagttttgagttactcaccttgataagggatatgcaatcctggcagaagaaattcatacaagccaaagtcacatgggtgcctagaatgtgtaataaagtagctgattgtttggcgaagactccattcccaaataatacttctttttcatttttctcttatgttccatcttttgttgtacaattcctccatgaggattatacttcatcattataa

SEQ ID NO: 192752 - DNA, 463 bp, Arabidopsis thaliana landsberg
atggatttttctgatgatctcccaccaccatgtgtgaacgatcatgtgaagagaagaagcaagaaaagaagaacgataagaacgaagcatcttgaagaactaattagcaccgccataagagccgctcatgttgcaagagacaaagggttttacatagtctctccggaagccatacaatgcgttgagatccttagacatatgcgaaccttacctctcaacgctcgtcttattagcaaaaccgacggtttacgcgttcttctctttctctctaagaacggtaaccctaaaatcaggtctgagtctaacgccgtcattgatcactggaaaagtatcctccaaagaaaagttcactaacggaagagaagagatcattcacgaggactacgtacgaaggtttacatcatcaatggacgagtatagactagagattcacgaggatttcatcatcaaccggagagtatag

SEQ ID NO: 192753 - DNA, 303 bp, Arabidopsis thaliana landsberg
atggaccgaggaggactggcgggccggttcgtgccggccaagtgcgcactgggccccagcaagcggaccgtcggcgtacgtgtacggcgcagcgacgccgacagcccctgcttgctgcgaaccgccgttctctgcggccatcatgtattgtacattggcgcgtgtgtcaacagcaacaccgtctgtctgtacagcgtcccagaccaaaccgccgccggaggagcgttggcgatggcggagagaggcagcggctttgaacaggaagccattgcccattgcattgcacgcggtgaacgagagaga

SEQ ID NO: 192754 - DNA, 336 bp, Arabidopsis thaliana landsberg
cttgcgcactatgtcatagagaaggtgcgcgggaacggcggtggggccggcctgctcgacctgcgcgggcgtcatctcagagatctcgaggtcgaggtcggtcgccttgatgtctgggctcgcgccttccgcgcacagaagcgcgttggagaggatcggcatcgcgttagaccgatccaccaggcgatgtacgaagctcaacgactttctgagattggaccgctcgagcgtgaagcgcatgaacttgatccgattgctaccggtggcacgccggaaaccggcgcggcatgtgccgtgaagttccggcaagcgccggatggatgtgaacagccctaa

SEQ ID NO: 192755 - DNA, 1139 bp, Arabidopsis thaliana landsberg
atggaggttagtcatcgtcacatgtgctccatatcatttacatgtgtccataacataaggactatattcataagagtttaatctttgtgagttttgaccagatctttcaatggctcttcaagttagggagatcagagcctagttccatcaattgtactgatcatgaacccaccacaactctaacaagtaagtaacaaaaacatttcttgatccttagatcacaatgtacaacactacatactttacttatcataatatatattctggtgagtttatgtagatttcatatgttggtaattttaataaacaagtcgttggctaatcaataagaaatatatagtaaacattttgttttctgatagaattatttaataaatgtgatccagattgtaaagatcacagaacaagaagatcatctacaagaggttctaaacataaagaccaaaggagctatagaggaatctggttatggtgtagaaaagacgtagccagggcttgtttctctagcacttttactttaagaagacttaatagctttaggagagggcatttgcttcgctccatggcaaagataaaagcgcaaggaggagaagaacaagtgacatcgacaaggtttgatctgaaaaaggctataagagtcttgcaaccggagaaacaagacgataccaataaagagaagtcgaaaagcgagcagagcaaaggtaaggccacactttcaagaatgaaggagcttatcaaatgggctgcagcagccaaatccgacaaagctgtcaaattctttacccctaaggtgttttttttttctttctcaatagctcaaactcattagaaaactcaattttgttataccattgttattgatgaaacatatataatattgtagataatgatggagttgaaaaaccgaagaaagttgaagatgatgagagaagtcaatgaagaagaatcaacaaaaaggatgagtagtgtatctgcaaagataagtttgagatgggagagtagtgagagttgcacaacaaactcttcctctgatcacatctctatagtttcttccccagcaatccttgtttccttgagtcctacgcctctctaccgatgtagatccaggaaatgcaactggatcactactgattctgaat

SEQ ID NO: 192756 - DNA, 242 bp, Arabidopsis thaliana landsberg
agagcccaacgagtgaaaaattcccaatatttggtgtccggattggcgccaacacactttttggcaattatgttttggaaactgagattggatttaccagatcgacccatatggccggtctaaaggataacttcaatgtctcccctagcaacatcatcaagtcaactatggataacctgtcggttgaagaatatcagaggctggaagacgccgggacaaagatgcaggccggaactcgatga

SEQ ID NO: 192757 - DNA, 200 bp, Arabidopsis thaliana landsberg
agttaaaacgaactaatattgatgatgatacacaagtatttttccttttattaatcaacccaaatggacattgggcctctcgatatacacggttacaaaacaaggctgggcccaaatcggaaatccgtcgaatagagatattgataaacgggcggtacaccggaaacacaaatatgttgttctctaaagacaacttatag

SEQ ID NO: 192758 - DNA, 174 bp, Arabidopsis thaliana landsberg
ggacaaacattcaccactaccgtagtggcttcaggcaacggccctttaagtgctaccatttgctggacggatgtgaaaggttctgtagaccaggtgaacaaactcaataaccgcaccaagcggctggttaacgacctggatatacgcattaccaaaggaagcggaacaagccag

SEQ ID NO: 192759 - DNA, 163 bp, Arabidopsis thaliana landsberg
aaagaaaactatcggatggaaaaccacgctcgttgaacaaaattccacagccattccgcagatcgcaccgaagccgctaggagaccggttgcgatactcgcataactccggtacaacaggcagaagaagttatcgctatcgttcgttcatcgatatcaagctg

SEQ ID NO: 192760 - DNA, 161 bp, Arabidopsis thaliana landsberg
atggttggaaattggacaaattagaagagcttttcctcccacaagatatagctcaaataacggcaatggtaccaactgaagttttggaaggtgattatgtttgggctttcactacaagaaaacacggtttttacgacaacatcaggagactgtataagtag

SEQ ID NO: 192761 - DNA, 188 bp, Arabidopsis thaliana landsberg
gtcatctcaggtcaaccgtcgagttagcaaagcgacttgtccgcagcgatgactgtctttcgatcaccgtaatcatcatcccttaccctttcattagccacgacgacgttgaaaccacctatatagcatctctcacgaccgcatttcaagatcgtcttaactacaaagccatctccgttggaaattaa

SEQ ID NO: 192762 - DNA, 417 bp, Arabidopsis thaliana landsberg
atgtcacaaaccacttatacgctcggtttttctccctgcccaaacgatacattcatctttgatgcactggtgaacgggaagatcaacaccggtgatatttcttttgatgtagtcctcgaagatgtgcaaacactcaatgaatgggccatagcgggcaaactggatttttccaagatcagctatggcgtgctgcccctggtggcggcgcaatatggtgtactgcaaagcggcggcgccctcggaaagggcgttggccccctgctgatcacaaagaatgaaaacctggcaataacagatatagatacactacgcattgccatacccggcaggaacaccacggcacatatgctattctcactcgcatttcagcacgcctccaacaaacagttcatggtatttcatgaagtggaagatgcg

SEQ ID NO: 192763 - DNA, 381 bp, Arabidopsis thaliana landsberg
atggagacaaattcgtctggagaagatctggttattaaggtaaattaaactaaattttagggggaagatgattgttttaggtgtcaaagattgagaattttaatgaaacttgatatagactcggaagccatatacgataacaaagcaacgtgaaaggtggactgaggaagaacataatagattcattgaagctttgaggctttatggtagagcatggcagaagattgaaggttgattttttatttccctttatatgtcttattttttgtgtttgcagaggtttgtcttcaaactgatttgctttttttcatttggacagaacatgtagcaacaaaaactgctgtccagataagaagtcacgctcagaaatttttctccaag

SEQ ID NO: 192764 - DNA, 166 bp, Arabidopsis thaliana landsberg
atgccccacgacggtcaagttgttgattcggtgtgcactaatctgacggcgggtttctccctcttcgtttgcctcccagctcgagctggtgtttgcggcgccctgcacttatatatcccagagctccaagattgcacggggccaagtctgcggttcatggcggcgg

SEQ ID NO: 192765 - DNA, 478 bp, Arabidopsis thaliana landsberg
atgtatttttcgcactacgaccgcatgagcggcgagttgtcgatcaacaagctcaacgccgataagaatggcaaggcgatggacagcggcgatcgggtctttctcgatttccttgaatatgccggtacgaccctcgatgatttagaacaaacgacgcattttgaagaattaaacgccaagtgcgaggcggctgcgctgcggatcactgatcagattttcgagtactggacccagaacgacgaactgaagattaaggtcgtcttctcagaaggcaagtcgggcgatcccgcgcccttcaacagcggtcccgtggcgcgtgcgcgagtcgagaacggtctgcacggcgttaccgttccgttttcggagcgatcagcaggtttcatttggttcttttccttcctcgtcaagtttgcccagataaagaaaagccacggcaacgttatccttttgctcgacgaaccagggctgactttgcacg

SEQ ID NO: 192766 - DNA, 175 bp, Arabidopsis thaliana landsberg
atgtattttttaatgcatcatatcctcgaatggtccaaaaacaaatacacgatttttgattttggcggatcaaacaataaaaacgtggcggaattttaccgcaggctgggaggaaaagatgccgtctactatgaaattgagatcgacaggcgaaatatcttgcataaaattgcgg

SEQ ID NO: 192767 - DNA, 324 bp, Arabidopsis thaliana landsberg
atggggcatcaaacggaagtttgtcttgcagtaggggtgaaaatactacagcccaccacgggtgaaaatactacagcccaccacgaaaaaaacgtccaagtagaaatagtgaaggaagtagagaaggtaggagatgtttccgttaaggatactgagaaggtaacccaaaacaaaactctatcagcgatgcaaaaagttgatgttgaagggatgggagacaaggaggaaggttctcttgaaattgagcaggatggaagatggattactccttctaagactggtcgtagtccaggaaaacagatcgttggtctaaaatatggagag

SEQ ID NO: 192768 - DNA, 185 bp, Arabidopsis thaliana landsberg
gtcgagcagaaacggcccaatacctttttaactcgactggcgaaatgcaaaatgctgagcgagcccgttccgctgacaccgccagcaatcgcttcgcgtacacagtttttttttccagcagcctgcgccgggcagcttttctagcgtccgcacaggttttctgcgcggaattttctgagcactag

SEQ ID NO: 192769 - DNA, 81 bp, Arabidopsis thaliana landsberg
tgcctgctggggctcacggcggcgcttgcggtacacattgatgaacgtggtggtcaggatgcggttgagccacgcgcgcag

SEQ ID NO: 192770 - DNA, 405 bp, Arabidopsis thaliana landsberg
atggtgaacaagctgcagaccggggaatacctggcgggctatttcctgtcgagcacggtggtcattccacaggcgtccaagagcgccgggctgttgggctgaagcaacatcgcggatggcacgccgatgttcttgcgcggaatgggcataccaaagtcggcgccccaggccaattcggccaagctgatgctggactacctcctgtcgcagaatgggcaggtcagtgtgtaccagggcggattcacgccgtaccggtcgggtctgcccgccagagaggcgccgcggtcttacgagtccatcgtgtccaagctgggtaagaagaacctgatcatcatcgggtatgacgatgtctcccaggacgaggaacagaagatcatcaagaagtggaagggtttgctgaagtaa

SEQ ID NO: 192771 - DNA, 648 bp, Arabidopsis thaliana landsberg
atgatccatagaacgacaaggtacaagcaggcaccacacaattatagcatagctaacaatatatatatgctcttgcaaccaacaaacaagcaacaacaattcggttcccttttatctgtctgcacccgtctcctcaggctcgtcagtcgttcacgggccgcaacatagtagtcctatatatttatgcatttggtccgacaagcaatcctacgatatatctttcccggtcatatggtacatgctaacctctatcatctccacttatcccatctcattctctttatcaaaccttgcatattgtaggtcctcctctttcttacaagaaaagagtaaaatattgatgaattcatttcttacataatcactcgtgcttatagaaaactcatacttttcacacaaaaagagtatgtggctaaaacattaagttctccctttttcttaagcattacgtagatcttcctttattagtatataagatatttatttaatttatatcagagcttactatgtcttaaatatagtctcacttaatctacagaagctaaactttagattatgacttatattagtccaccgtgttcgatcagagcaagtggagataagcggtatgataagggtctaaaagcctggtttgcgatgcgagattga

SEQ ID NO: 192772 - DNA, 72 bp, Arabidopsis thaliana landsberg
atctagatctcacagcacagacatccctttcagacggttctcctcccctacagtgcaccaccgtcaacgcat

SEQ ID NO: 192773 - DNA, 426 bp, Arabidopsis thaliana landsberg
aaatgtcgtgttagtctgtcccgatggaagtcgaagcacattaccaactcccagaagaaaattcaagagcttaagagtaagttgcataaggcttatgagactcttccaataaactatgctcatatcaatgatctcaaaaatcagttggttaaggaatatcggctggaagaggaatattggggaactaagagtagagttcaatggcttcaagctggagataaaaatacacggtacttccatgcgaaaacaaaacagaggaggaattttaatcgtctcacttcccttgtagatgagcagggtaacgtttgtactaaagaggatgaaattcacaacctggtggagacttacttcagcacccttttcacttcgcatgaaagaaacaacatggaagaggtattgacgtctattcagcctagagttacggag

SEQ ID NO: 192774 - DNA, 249 bp, Arabidopsis thaliana landsberg
ggtgtgtcaactagtacaaatctatgcaacctcgctgtggtgcaatcatccactcttgaaacacataccaaggagtctgacatgtgtgcaagtcgacgggtcaccaaagacaatgtcatccacataaatctgtatgatgatcatcccttgacagaaggtgaagatttgtacaataatcaatttgatgagttgggcgatttacggatgaagacctatcaaatgtcatggcaacccctaatcccaatttga

SEQ ID NO: 192775 - DNA, 307 bp, Arabidopsis thaliana landsberg
aattttctccgacaaaccgaaagagttgatcttagtcggaagcatctcacagaacttagtcccgtcctcgctgagcgaatagccgtgccaggccatattggtccaccaactcgcattgaagggatccataggatgtatagtaacaatgttgtatggtgtgagagttaaaaaatattagattttaaaaggtgttttaagagttttggtacaacaaagatatcctatatttaacctttaatacatgactatataaaaacaactttgcaggtgtttcggttcttgtgttcttggtgaactgattaaatag

SEQ ID NO: 192776 - DNA, 74 bp, Arabidopsis thaliana landsberg
atgctggagggcagtgatcaacctgtgattatctctttgatgcagtccaatggaaggctcatccagtaccacag

SEQ ID NO: 192777 - DNA, 210 bp, Arabidopsis thaliana landsberg
atgagtgaacaaccctcatctgtttcaggtgtcaaaaaggtagtgcagcgtgtcataagctatagttttatacgtttgacatccaacataaaccaaaaaccaattgtttcttaccttcatatttttttaacgcaggttgctattatccctgaaattcacatatcggcaccagtacttgctaaaattgttagctacgttgctgaagaaagc

SEQ ID NO: 192778 - DNA, 166 bp, Arabidopsis thaliana landsberg
atgatggactacaatggtgaaaatggggaaatgtcaatgagaaaagatgatgcgggaggagaaggcggagagtcgataaacacggacaatcgttactcagatgaaatggatccattaacagaggccatcaacggtttcttggccttgcaatatgctcttgaaaaag

SEQ ID NO: 192779 - DNA, 1463 bp, Arabidopsis thaliana landsberg
atggcaagttcaaaggggtctcagaatcatagaaatctgggatgcaatgggaaacaagctttactgcctccgaaaagtccgtttacgggtggtccaacgtttagtgcagattttgttccaagtagtgtgattggatccaaggctgttcagaagcttggagaaggaaatgccaatcatcatcgaacttcatctgagagttttcttattgaggaacagccttcttggcttgacgatcttctcaacgaacctgaaacacctgtacggaaaggagggcatcgacggtcatcgagtgattcatttgcatatgtagatgttcctgttggttttgatgttgattacacgctttgggatggtggtagatataataacaataatggtttctctaatcacgttagaggtcccaaggagtctgattaccttagaagccagcctgttcctttctacccttcagctcatttgtccaaacagaaaataagaccgtgggattcattaccagattccggtgctcgcccgaacagtagttctggttgtttggagagtagctctatcacaagatcagggtcttctggtagcctacgtgatacagaaaaggcttattctgctgctgatagcaagaaagatttcataaataatttcgcaaagtcgtcattcgaaaaacgggataatcctctggctaagtctgctacttccgaggctgatacgaaacgtgctagacagtacgtcgtctattttgatattttagtttgttcttgagctgtttctgataaagattcatttagttcagttgtaactttactctgcttaatcaaaccagatgattatcttttgcaggcagcttgcacagcgctctcgagtccgtaaaattcagtacatagctgaactggaaaggaacgttcagatgttacaagtagagggttctgaagtgtctgcggagcttgagtttctcaatcagcagaatctaattctcagcttggagaacaagtcccttaagaatcggttggaaagcttagcacaagagcagcttataaagtactgtaagtttttcagtctcttaccagaaccccaaaacctttttcttcattacttcatatcactttgaagataggatgtctggttttgccagttcttaggcataccagagaacttattttaagctatggtacactactataaagcttctaagcatggagtagaaaaatgatgccttctagtttccttgaggatgtaaattgtatttggtgagatgttaacttaatcttgggtttctttttacagtagaacatgatgtattggagaaagagattgtgaggctaagggctttataccagcttcaacagcagcaagagccgcagcagcaacatcagacaaaaaagcaaggatcatctagccaccagcgttcgaagagtagagatccagagacgcaattcacgaatcagtccttgagaaacttaacgagttcaaag

SEQ ID NO: 192780 - DNA, 67 bp, Arabidopsis thaliana landsberg
atctattaaggtgaattcttacatcttgtattcgacaattagagaaataatctctaaaccctattga

SEQ ID NO: 192781 - DNA, 440 bp, Arabidopsis thaliana landsberg
ctatcaagaagagaacaaactctctcaactctttcgttctcaagtatttgcttgcaagtgtctgatacgtacaatggattaccgatcatcaatggagtcttcggaaactctaaggtaactattttcatggcctacgcctataataccaaaccataattccatcaaaaactccaagagaagactaatggagctagtggcatgcaatatcatatccaaattcttgattcaagtgatgaaaaccaaaactaagttttattgatttgaatgtatatacatgtcaatgtacaggaacaagtgtgccgcctgttacaggcaattcaacaaactggaacatttggtggagcacatgaagatctcttatcattcgggtcatgaacctacttgtggcgtttgcaagaaacattgcaggtcttttgagtccctccgagaacatctcatag

SEQ ID NO: 192782 - DNA, 488 bp, Arabidopsis thaliana landsberg
acgattcagcgataatcgccttaacggatccatccctgagtttatagggaacttatcaaaacttcaaagattgtaagccaagaaattctgcattacagttttaatagcttgaagcattacaatgttttctgacttgtgcctatctttgatcagagaactttacgcgagtggcttaaaagaccctattccatactccatatttcgtctagagaatctgattgacctgtaactaatccatttctcaatacattgtaagttacagaagcatgttgctcttcttgaatctaaactgtagccatttctttaaacgcaggagaatcagcgacacagctgcaggattgggacaagttcctcttataactagcaagagcctgaaatttttgtatgtccatacatataattatgtgtctggaccagagacaagatcctacgttttacataagtgtttaagactcaagattgattctgttaactttccagggttctaa

SEQ ID NO: 192783 - DNA, 371 bp, Arabidopsis thaliana landsberg
ggtatgtgatgaattaaggcagtatattattgatatcgtcagcgtccatggcggccatttcggcgccagcctgggcgtggtggagttgacggtggctttgcattatgtctttaacacgcccgatgaccaattggtctgggatgtgggacaccaggcttatggccataagatacttacaggcaggagggaacaattttacacgaaccgccagtataaaggattgagcggtttcccgcgccgggcagaaagcgggtacgatacatttggcgtgggccattcttccacttccatttcggccgcactcgggatggccatcgccgatgcggaaatgggggatgccagccgccaacatatcgctgtgatcggcgacg

SEQ ID NO: 192784 - DNA, 1257 bp, Arabidopsis thaliana landsberg
gaagcatttggtgtgattttaaggtcaaacaggaaatattcaagtatttatgaaatcaagaaggttttaggtgttttggagcaaaaaaaaaaaacaaaagacgatcaaaatgcatttttggacagattcgtagctcaggttttgcatccatttaagacattcccgtgcaccaaattgagagattttggactctatggaaatgtagaagggtcaaaaaccgcaatgaactggaattgtggctcggtcagaccatttaagtttacccacctctccacacctatatctgcatgccaaacacaaatgaacagaatacaaaaacagacacatttataaatattagtttccatgtagactcgaggatgataattttaacgcaaatgactgttgcgtaaaacaagtttatcaccaaaaaaaaaacgaatcatcttgttctctcatgcatatgtttcatacatgggtacagatctctgtatgcaggagaagagacatgaattacatgattatacttactacattatcggagtggaacacagtttaaagatgttcaaagttcactcaacacagatttttgaatacttttagttgcttgagacactgatatgtgattaccataaagttcaaaataaaacaaaagtatacgtggaagataaagaacaactgcagtaggcgatcgcataaaccaaaagattttggcattcccataaatcacaacaaggaacgagggaaaacaaccaagttgagcataccacatataatctttatacatatacatatatgatgagacctataaaaatcatttatgtccgactaatatagataaaactatgagcatgtcttaccaagtatcttcttgctctatttcggttttatactttataaacctaaacaagttctctactaactataacttactaactaatgtgttgtttcataagatcattatctagtaaggtgaaattggaaatgaagtaatagtaaactcaaaatgacctgaaacaggagcttattcttcttcccattcaacatcttcttcttcttcttcctgactcatctgtcctctcagttcccctgactacatcagccactccttccctgatcatccatagagggaggttttccactctaggatcttcatcttccctggtcggattcaatcttgcccgattcaatcttgtccgattcaatcttgtctttctaaaacgtgcttcggctgaagcgaaaaaactagcagacgatattgaagaagatgaagatgat

SEQ ID NO: 192785 - DNA, 2949 bp, Arabidopsis thaliana landsberg
  unsure (1)..(2949): unsure at all n locations
aggttctcctccaagggccacctagttactctgacaagaagtgcagcctctgtcaacggaaactctccaacttcgtttaccattgtaagttatgcaatttcagcatagatatggaatgcggaaacaggcccccgccccacaaagtggatcatccaaagtgccacgagcatgcactcaccctcatgggaagggaagtatccttcacttgcaatgcttgtggtacgcatggtgaacggaacccttatgtatgcctaccatgctctgtcatgtttcattatgattgtattgatctaccacacgtcatcaacatcaatcgtcatgatcatcgcatttcacattcatatcctctcaaacgtgggaattgggtatgtgaaatctgtcgtcaagatatcaacaccacgtacggaggctattcatgcaacaaatgtccagatttttttgttcattcaaaatgtgcaactagaaaagacgtgtgggatgggaccgaactcgaagggatacctgaggaagtagtagacgttgcgccatttgaagtgatcgaggaaggggtaatttatcatttctcccacgagaaacataacttattccttattgaggatgtttttatagatggtgctgaagacatgcattgtgaagcttgcgcccgtccagtctcttctgagaagcactacaagtgcgtggaatgcaagtttattcttcacgaagagtgtgcgaatcttcctcttacgaaacgacatggactttccacaggtatattttatcttcgcttcgggaaggattttagcgaacaaaatttcagttgtgatgcttgcaatagagatggaaggggttttagctacaaggatgaagagggtgtggtactcgatgtgttgtgtgcgtctctctctttcttcaagcaccccaaacttcatcctcacacgttatttctaaccacaatagatcgtggtacttgcttagcttgcggtgagaataaactcaatgtgctgcgttgtgttgattgtgattattctttggattacaaatgcgccactctaccattagtcataaagcataggtgtgatacacattatttagttttgcgctctggggaggaggcgcctgaaggtaaatnnnnnnnnnnnnnnnnnnnnnnnnnnnnnnnnnnnnnnnnntggttctatacatgcgatgattgtggggtcgtgtgccatattgaatgcgtaaccggggactttttgaacataaaacctggaataataatgaagaacagggagaataagtttgaagtgggtttcaacgatcacgattctagaccaaaatgcactgattgtggctctcgttgtaggttccctaggtttttcaaggttactagaaaaaatattgagtactactattgctcaaaagcttgttttcagaatgcgaaattctgaatgcctgaaggaaggcgaaaggaaggatttggaaacataaaaagaatatgggtttttacagatggaggctgtgtaatgtttttcaattattttcagataaacttgttttctatatttggatttattgttggtttgctcattcagttcataaaactatttatgagaaagagagaaagagagagagagagagactttgaaggtaattattcttcacaccttttattataattcaccaaaattgggatgtttgttctattcttgatcacacgcctctctgtcgcttccttttgacgatttctttcttttcttagcttttccttttatctttcgcgtttactgtcttttcttttccgtagtaatttgggattccaaatttttttcattcttaaatttctccacgagctcatcacctcctttcgtctctgcctctcatttgtctacaaacattttttccttatgattcgtctctctggtttattgctcgttgatcgtttgtttctaaattgcattctgatttctgatggatcgtgattttcatcgtcgtggtcaagtggtaagcattacacgcaaacacagctttgatcattaaaaatgtcatcttatttaaatcatgtcttgagatcacgtaatggtcttaggtcaatcaagatcaacgcgcaacaaattctaatgtttttacaaaatttgaaaatacttatctacaaatgtatttataaagaaacctaatttgcctttgtgttgatcatgatagacaattgttgttattagcctgttgatttgaaggcagagtcctctgttttcctgcaacatgttagaacagctcatttatgtgttttggtgaaaacgcaggcgaatgatcgtacacaaagcaactttgttcgattggataaaccgagagctgtagacgatcttgatataggcaagagagggaagatgcgtaggtggttgtgctgttcttgtcgtgtacaagaatcttacccatcagctgaaaataaccgattgaaaacccctcctactcgccattacgactatggtatcgctctttcttcaccttacttgtgattgaagtaacctatcaaattttattcttggcctcttttagttgcattccaaatgtgcttttggtccattcctaacctttcaatattttttgcttgtgtaggacgtaacaacaagaaaacaccagctcctgtgaagcctcctgttttgaaggagcctccgcatattgatgtccccgcaatgtcattggttgagctcaaagaaaagactcagaattttggatcaaaggcattgattggagaaggatcctatggaagagtgtactacgcaaactttaatgatgggaaggccgtggctgtgaaaaagcttgataatgcatctgaacccgaaacaaatgtcgagttcttgactcaggtctctaaagtttcgaggctgaaaagtgacaattttgttcagcttcttggttattgtgtagaagggaaccttcgtgtccttgcttatgagtttgccacaatgggatcattgcacgacatcttacacg

SEQ ID NO: 192786 - DNA, 783 bp, Arabidopsis thaliana landsberg
gaaaagaaggagctggaatgttgtcgacttgaatgcgttactcttgctgataggcttagatgttctgaggagaatgctaagcaggacaaagaaagcaggttcgtactttgcatttctctactttagaatgttacaattatatctcctttaaaattttctttttaagcttttcggcacttcactgatctgtatttctctagttgatgactatatctcctttgacttcagtttttatgttaccatgtagcctggagaagtctttggaaattgatagactgggtgatgaacttcgatcagcggatgctgtgaataagcaatctcaagaggtaagaatcatttcacaaaatgttttctctctgaacgtctaatgcagaggttgtattacaattttcgatgagaaaactaaatttggaatgttaatcacaacacacctgactttctggttatggtattcatgcttttggttagttaaagatcagatgacatcacttgcaaatttgttatgttaaagatgcaaactttcctaaacaaaagttatatgtgcacctgcaggttctcaagtctgatatcgacatactaaagtccgaagttcaacatgcttgcgagatgtcggatacatttcagagagagatggattatgtcacaagtgagcgccagggtttgctagctcgcatagaggagttgagtaaggagcttgcttcatcaaatcgttggcaggtttggtttacagctcacagacttgactctattacagatatagtagtaaccattcattctcactaa

SEQ ID NO: 192787 - DNA, 1005 bp, Arabidopsis thaliana landsberg
gaatttccagctagttcaaatttaaagctcaacagagatgtaaagatcaacaatgagatggaaaaaactgttgagctgcttggctgctactttcatcccatgcctgtttcatcagtattactcaggactgttggaaatgaaatctatatttgcgtgttgagctttgctacagaagatagagttaggaccctgtttatgtacaagatgtcagctgaggcaccaagcaaaggattcccgtctatcattggtcacactcctgccatactccccattgtggatgacaaatctagtggaaatgtaaatacattaaactttttcgtagtttcttctcaaaaaaatgtttttcctctctagttatctaatagttgttagttgttacatttcgtcagggaacactcgagatatctaatgtgcacttcactccagacgggctgcatcttattttaactggcaacatcaaaacaccttattgcaggtttggactctttattgtttcatatggtacagagatacagaataaagatattagctaagagattattattttcccttttttgcaggaagagggaaactgattgctcgtgtttgatttgtacatcagcctgttttgaggagaatgcagtgaggattgtccaggtgaaaactggtcatgtttctcttgtgacaaaacttcaagcagatgacagtgtgcagtgtgtggtggtgtgcgatcctaacaatctcattgcagctgttaagagtggaaaccttattgtctgggccatgaactcgcattggaggtactctcatcagagttcattactcttctcttaaaatagttgtcagatccttcttctatttggagctattggatcatcattggaatttttgctaatgttcttgtatccttaatttgcagtggtcctaccgaagaatatgttatactcgcaaatccttgcatatcatcatgcatcatggaactgaagaagataccaaaatgtcctcatctcgttattgggcataatg

SEQ ID NO: 192788 - DNA, 524 bp, Arabidopsis thaliana landsberg
atggccaaaaacggctttacaccgctcaatggaaggacgtaatggtggccaaatcgctagagaataaggagccgtaagagtgttatctttatcaaacactacacctttgaagccctttctcttcagcacttcccaatcaatgtatcttaaatctttcacagaaacatgcggaagaacaaattgacgatctttaacaacaacggagaccgaagaaacgataccctcaatattgattcgttgcccaagagccgctttcagatctgcccaccacatgttcgacgaaattgccaaccctttgttgttgtcttctactctcggcaacaccaattcgcgtggctctccgtcgaattgttccgggatccggttagagaatcctgggtcttcggtgggagagctaaattggtaaagaagaaacgaatcttcaaacgtgggtagacgcagattctgcttttggcttcgatgggttgtcgtcgtttgcagaggagacgaagaagaagacgaaggaggaggaggagagcaaatgg

SEQ ID NO: 192789 - DNA, 369 bp, Arabidopsis thaliana landsberg
gagtattctcgtcgtcaaggacacatgaaacccataagactcaagttttgttcccttggtcctcttcctcaggtaaaaacctgaccatttattaacccttgatagttaatctcctttctgctatatgcttccctaaggaagctgcagtgccgaattgaaagaaagaaaaaaaaatcaccaatattacgaatgggcccaaagcccattaatgttgtcccttttttgttattaaaagcccattaataaccatgagtcgttgtttctctctttcaaattgtcctgtgagatcatagcgccaaagaagcaagaagctgaagatcattctcttttttcaccgagttttcttctctcttatcaccgagactcaag

SEQ ID NO: 192790 - DNA, 407 bp, Arabidopsis thaliana landsberg
ggctcatctgcaaaacaacccacgaaggggtatcgagggcctacaaccgtccgattagaaaccggccgccaggattagtccatgccttatatgaatcggtaaacaatcctgatcggtggatcgagatcctacggctcagatctatcatacgcagtaacactcccacgaccgctttccggccgccagatgcggatcgaacggcgtcgagcctattacgcgaatcggtatgcacatgatctaatcacagccgttgctggtcatccaacggcgcacaaccgacgccccaacagcgcccacacgcacggcggcgccgccccctgccccacgcccagccgaactccggcgaggtcgctaatcggtgctcccgcgcgctaagcctaaatcgactcgagatatccatgcggaag

SEQ ID NO: 192791 - DNA, 3 bp, Arabidopsis thaliana landsberg
atg

SEQ ID NO: 192792 - DNA, 178 bp, Arabidopsis thaliana landsberg
cattgatcaaaactgtctttcgtgtaaaattgtgtatgcagatacggtttctcctacagcctttgtgactgcatcaatgccatttacaagtgcacaaaacgtgtctgttaatattacttttactgagccatgtgttggtagaggaggattcggctgttcatctgtgaattcctgcgac

SEQ ID NO: 192793 - DNA, 149 bp, Arabidopsis thaliana landsberg
ccagccacgtccggaactggacctgtcctgcgaggaaccacctgctcaatcaacccacaccattttcgccggcacccccaatccgtacccaatgcgaacatcggctgtcaacccttattccaagccatgtcaccccaccctcaacctga

SEQ ID NO: 192794 - DNA, 571 bp, Arabidopsis thaliana landsberg
atgtgtataagattgtcaaaaggttacaaattggaaacagacaatgtaagaaagaggagtaccttggatttggacaaattgggcaaagagaagatgaaggtggaaagaggagcagcaatgagagtgagaaacaatgatccaacgaaaaggcctggtagctttgataatcccagcgatattgctccttcgtcgcggagtggaagaactacgaaatacgcgctcaatatctaattcaatagaaacaaaagttaaaggacactcgaaatgaatggttaaacataaagagagacagagagaaggagatcggtatacgaagaagaagcaggaagaggagtggagcaacgccggaagctcgtgcgggtgcaccgttactatcgtggatattaccgcatctaatcgaattctggctgccatttggtaccctcaagctccaaggtcaacgtttcggaagaccgatgatagccaaatcggagaagtaaagagacgaagaaggaaggagacaaacaaaaaaacatacagaaagcctctccctcattcagaagtatcgtcaaaacggcaatttagtggatga

SEQ ID NO: 192795 - DNA, 685 bp, Arabidopsis thaliana landsberg
atgacaataagtacaacagatcttgggagaattcagcgtcgttttggctggccttccaacttattccaacctcagggctgtgtagaacctgcacgttcacatacaaagtatgttgttacttgtagttttgtatgatcttaggaaaactttgcctcaaacatgtgtttgagatttacagagaagcagaaaacaggaggtctaatatgtgtttgcctcaacttggaactcttccttaggatgtcctattcactaagcatttatcatacttttcatgtttccatcaagattcatatgaatacaaacatctcaaactctaggggtcttctatcaaaattggaatttttcttttggattgtaaacgtaacgtataacaggaaggggaaactacagcttgtgtgttgagccaaacgatgagttgaatgttgttgtttccaagaaagtcttaccttgagttatgcggaggaaggaggaagctatggtggtggttgtgggcggttcatgagactgtgttggtgctaagatatgtaatcagatgggtggataacatagagaccgggctgattcaaattgacgaagggctgatgatgaaggagggcgtgtagctgagagtgagaatcctgatgatgctgcatttgaaaacagtggcggtgctgtagctgctacggcggtcccaacactggactga

SEQ ID NO: 192796 - DNA, 189 bp, Arabidopsis thaliana landsberg
atggcaacgtaagtcaatcatcaaccataaccctcagtaattaaagagagttaagtatgaacttgtcaaaggaaatcaaaatccaacttgcatagactacaagaagtaacaagtcaacacaagtctaatagaagggagatgaaaatggctggatacgaacctgattacgaggaaaaatctcagcaatga

SEQ ID NO: 192797 - DNA, 220 bp, Arabidopsis thaliana landsberg
cttctttcagcaaatctcttcgaggactcttacactcatgacatcccctccttctcccttcgctatttcccctgcagccgccgtagcagcagatttgcctaatgaccctgacctgaccatcgttggtttcttgaagtcaccagattcattaccactctatctcttaatcggaatgatcgtttacaccgtctctattccactactgcaactgcaggtttag

SEQ ID NO: 192798 - DNA, 165 bp, Arabidopsis thaliana landsberg
acatatgcaaatggagattctgtcacgggtgcctctgaaatttttaatgaaattcatgtgcgtctcaaagaaatgggcatctatcattcgtggggaagaattcagagaagattacttgttccaatcaatgaaaaggcctcgagtgttgttcgtcatcgatcatag

SEQ ID NO: 192799 - DNA, 546 bp, Arabidopsis thaliana landsberg
atggagatgaagagagacattagagtggaggaagagaacatgtgtacttcattgttgactgcagttgttgttctttcaatggcttgtcttaaacacttctcttctgtatcgtatttgatcgagcaatggcgttcgttggtgtttcttatactcaacgtcgttctcttagccgtttactttacctcgactcgtcctaacctcgggaggagtcatgatttcaagactcgtcgaggaggtagattgagaatgatgcgagagaaaaagaataagattaagaagaagaagacaagggtggtggtggaaccggcttgttttgaccaaggtttcttacttgttgagccaaaggaagtgatcaagaagtgtgttttagtggaggagacgaaaagagtttgccctaaatttgaggaaactgtgaaagattgcttgtttcacaagaaagaaatagagtataatggagaagaagatgaatttgagccagggaggttatccaatgaggagttgaacgagagagttgaagcgttcatcacgacgtttagacaacatttg

SEQ ID NO: 192800 - DNA, 128 bp, Arabidopsis thaliana landsberg
atgatcacagcggaggattcgcctgctatttcgcgggggactgtttgtgcggcagcggaattcggcatgccccaacagaaaagcggataagggagggagaagaggttcctgacatccaggccccacac

SEQ ID NO: 192801 - DNA, 150 bp, Arabidopsis thaliana landsberg
catgaagaaaacaatacgaaaaggagaaagaaagctcgaaaaaaaaacaagacgaaagctttaagagattctgacttcgctaccgatgagcaaatcaacggatccaaagcaacctcagattccacaagaacccaccaataccattactga

SEQ ID NO: 192802 - DNA, 376 bp, Arabidopsis thaliana landsberg
atggggaaggtatctccaaaggatttggattcaaaaacctcggtgaggaaaaagaagttgaaaagttcaagtaacaagtatttaaagccaggggctttggttcagctttgttacagcaaagcatcggctgctaagtcatgtaatgaattagggaagaaacgagtacctgtgtttgatactaagtcctgcaatgatttggggaagaaacgagtacctgtatttgatattaagcatgcgaggaacaataaaatggcagtggaacagttgaattctccaaaaagccctcttatgttgtcccctgtcaacgttgttaagcggagtactctggtgaggccaatgaagtttgatgatctgcaggtggagagtaataatactt

SEQ ID NO: 192803 - DNA, 99 bp, Arabidopsis thaliana landsberg
cgcaagagcagaactccgttcgtcggtggtggacgggattggagcttcgtggtgcacacagctccctccgcgccgacgctagagcttagtttggctcgg

SEQ ID NO: 192804 - DNA, 251 bp, Arabidopsis thaliana landsberg
aaatcaactaccgaggtgacaaggactttgacgagatcattgtggatcctccacagctaaaatttagcgagttgggagagaccaagacttttacggtgactgtcaccggaatatcgaagcggaattggaacaagaacagggcgtttatgacaaggaacacgtggctcacgtggacggagaaagatggttcccgccaagtcaggagtcccattgtcatatactcaataaaaggaccaaaagcttgcatgtga

SEQ ID NO: 192805 - DNA, 437 bp, Arabidopsis thaliana landsberg
atgatttcaggccgccggatcgtcaaccaccacttcaagaccctgatagaaatccgattgcacaggctccgacgggtgctactgtcagagactatcctcctccgacgcaacttttccaatcaggcgaaggatctccttgcggatctggatcgattccatttcgagcatccggatcgactcaacctagatttggaggatctgttcatcgtctaccttgtagatcgaatcaaactacagcgccggttaaatcttcagcgccaattcaacgggaggcaccgattcagactccagtcgtggatcaacaacgaccacttcctcatcctcgaccctctgtatcgtcgcatcatagctctcaaggccaatattcacacgatgaagaagatgaggaagaagaagacgaatgtgaggatgatttgtcaagagagccaactctctcg

SEQ ID NO: 192806 - DNA, 409 bp, Arabidopsis thaliana landsberg
atgagcttgtctgctattgcttcaaactgtaagaagcttgaacggttagctctttgtgggagtggtacgattggggatgcggagattggttgtatcgcggagaaatgtgtgacgttgaggaaattctgtatcaagggatgtttgatttcagatgtaggggtccaggcgttggctttaggctgtcctaagttggtgaaactgaaggtgaagaaatgtagtttggttacaggtgaagttagggaatggttgcgtgaacggaggatgacattggtggtgagtatggatgatgatgaaaccaatggtgtgggtttggtggatggtggtgatcagagagttcttgagacggttgttgaggaggaggctccgccagtgattgatggtgatggtggtttgggagttgcaggtggtg

SEQ ID NO: 192807 - DNA, 215 bp, Arabidopsis thaliana landsberg
atgccaggttccaccttgctcaaagatgtgcatattggaatccctagcagcggaggttagtactatttgtatgcctttgtttccgttgttcatccttcggtctctcgattcgtttagtgaatgtgcaatgttatgcagtctcggagggtgtggcatctattatccaaggttcttatgagtattatcattatcttcaggatggctttgatgacacg

SEQ ID NO: 192808 - DNA, 1914 bp, Arabidopsis thaliana landsberg
  unsure (1)..(1914): unsure at all n locations
tacaaaaacgcccaaagtgagaatgaatctatgtgccgatcaggtgttcgacaaaatgcttctgtggagagatatgtcaacgaagatgaaatttccttctttttctgctgcggaattacctgatttgaggaaaagtaacaagaggaggggatctcttaggatgatcaagtgcagagccgccggagctgacggtggacgcgtggctgttggggatgatgtgttttcggttactacttcttctaagtatgaagttgactatctgggtcaaagtactaagggagatttgaatctcaagcttgaccctcttcagtcatttggtatatatacaatcttcctttttgttttgttagttttcgaaattcagattggttttagtgaaatgtgggataaagttttggtctttggttagggaacttgattttggttgatgtttgtttaattgagataaataagagctaaaaagatcgaacctttgttgtgaatgtcacgttgtatgagcaaaatgtaactttggtgtatctatgtaggagatgggcnnnnnnnnnnnnnnnnnnnnnnnnaggaggtagcgagaacagaggctcaagcggctgaaaatttgattagagagttgggtatccaagttcgttatctaatccttacaactttgtgttatgtatttgaagtttgagtatccctttgttgcgaaaacatgaatgtattgagttatttgtgtctggttttatatggacttttctttttcttttgtgtcacattctcatgcctggtattgcagggccctttctctgcacagcactctcctcggggtatattttgtagtcgtacattgaatcttcggtccattagtgcaattggatatgatatggattacactttgatgcactacaatgtcatggtgagttcttcctttctcagacataagtaggaaacattttatgcacccatatttgatgctaatttatggtcttgttcaggcttgggaaggaaaggcttatgactattgcatggaaaatctaaagagcatgggtttccctgttgatggacttgcttttgatccggaactggtgatatgtttattttcttgtgaaagttgaaaggttccacattgtagtaccctatctagtttttagagtactcaaactatgttttctcttattataggttatcaggggtctcatgattgacaaagagaaaggtaatttagttaaggccgatagatttgggtatgtgaagagagccatgcacggtacaaagatgttatcaaataaagctgtcaggtatatttgacttttcaacaccattggtaatgtgaagaaaaaagagagttgcaaagtcattgttctgttttgaaggaagtctcattctcttattgtctttgtatggatgaaagtgagatctatggaagggagttagttgacctgcggaaccagagtcgatgggagtttctcaatacatttttttcagtttcagaggctctggcttatgcacaggtacgttcttttattacaagaaatggtagctgaacaatttgcagttgattttggacataatttacttttttttattatttgtaactcatataattttcacattcgttttctcaactgatgactcttcaccccaatgaactttcttttttacaaaattttccgcacggcttctgctaagcaatgaaagttcaaatcatttcagatggttgatagattggatgatggatttatttcggcagatcttggcactcttgattataaaggactgtataaggttgtgtttcatagaacctaaatttcattgaactgaaatctttgcatatatattttttaatctaatcattttttccaggctgttgcaaaagctctcttcagagcacatgttgaaggacaacttaaggttgatagtttgtccattccataa

SEQ ID NO: 192809 - DNA, 150 bp, Arabidopsis thaliana landsberg
aacaaagaaaatatacattctgtcagtgtcaataggccttggagaaagtggaaacatgatacaaaaaaggcagcagagaaatctagggaggaaccatataccaatttgagcttgagaactcgaagttttggagcatcatcgagtatacag

SEQ ID NO: 192810 - DNA, 647 bp, Arabidopsis thaliana landsberg
atgatacaggtacgcatttttagaacaagagcgaaaaacgaaattaaaaccagtggttgtcgaagaaacaacaaaataatgaaatatttacgtaaaaaaatcgttacattattacttattaggcaccggaatatttcaataacattaaataaggtaggtcataagctaactaaatcatgtctctctacttgctttttctcataaatgcttttgatatccgcctaataaccatatataacctcgacatttatctaactcctcgtctaatttaataccgtaatttgatgttacatcaaaacctcccacgtatattaattacgcccacacaccgctctatatacataacatcaaatcgtcaaagtataaattacaaaatgtattgtttcaccatttatagattacattggaaaaacatcatacggtgaacaatgacgtgtgtgttactggttttgtataaactactagttgcatgattaaagaggtcaacatttggggataaaaaggtaaaattaacagtcggtgtcgtgaccaatttgcgatttgatccagcggcggtgagaagctattatgggcccacgtgggcctacattacccgaatattatccctatcgtctctatctgcagctgttcttgctgattacctttga

SEQ ID NO: 192811 - DNA, 329 bp, Arabidopsis thaliana landsberg
atgcagtttctgcctgggctttttcaaatcatcgaaacgaccggtccggctggtgaaaaaagacagagtgcaagctttgggatgctgacccggacagccaatgaactgatggcgaatattcataatgatggggaattccgtcaccggatgcctctacatcttacgccggagctggaatccttctgggtttccgagcatctgaccgatgacgacttacaggtcgtattcgattatatgctgccggccgaagcgttggaccgtcaccctgtttttagcatccgcgataaaaagccgcggcctgatggaaagccaaagtttaagttttggag

SEQ ID NO: 192812 - DNA, 114 bp, Arabidopsis thaliana landsberg
atgagcacccttagatttggtgaacgggctaaagccatgggaaacaaaccaatgataaatgagatctcagaagaagatgtgaatgatttgagtgaccagattcgtctgctaaag

SEQ ID NO: 192813 - DNA, 566 bp, Arabidopsis thaliana landsberg
ggttttaccatcagtggggcccgcaaccgcctgggtgaaggccgcgatgccgcccacgaccagaatgccgccgtgcggttaagcgccaacgaatttcaaaccttgcgggccgacctcgatgccgtgcgccaggttctttcctacgccctggaccaggcggcgcctgcagacaaatagtgccctgccgttgtcgcatacagctatgccgacgaccgaaatctttgatattgtaggaatatcgaacaggaattgagggcattgcatcatgagtctttccgtctttgatattttcaaaattggcataggcccgtccagttcgcataccgtaggcccaatgcgtgccgcccgcagctttgtacacaacctcaagcatcgcggcctgttggccggggtacagtcgcttaccattgacctgtatggctcgttggccgaaacaggtcgcggccatggcaccgatatcggcattatgcttggcctgggcggtgccgcgcccgataccgtcgtttcggccgaaattgctcccgccattgatcaaatcaaatcatccggacaattgcttctgtggg

SEQ ID NO: 192814 - DNA, 349 bp, Arabidopsis thaliana landsberg
atggcgtggggtgagtggcgcatgacgcgtcatagcaaaacgatggctgttcaaggcttggcatttcctcaagcagagcaagggcactgagatggtgatatccatggatgaagatgagtgcccgggcgagcagaggtagcggccgtggacatcggcgagccggagtactgggcgccgagcctagagctcgagcatagagggatgggcggccgagcagggagtcggcgcgacacgcagggaaggggatccggcgcagggaacaaaagatgaccggcaacagacagcactgggggagaagctcgccagcatgattcggagccggcacggacgacgccgctgcaaccagggc

SEQ ID NO: 192815 - DNA, 68 bp, Arabidopsis thaliana landsberg
tttgggcccggcgtcttgtagctttcgtgtggtctgctctcgggccttccggtttgggtcctagcttg

SEQ ID NO: 192816 - DNA, 1495 bp, Arabidopsis thaliana landsberg
tctctcttcagttggaccatcagtaagtatatctcttctcagatgttgtatgtattaaaacaagaacctaactacttaaacatgttaatctgtctgattagggtattggaaaaatctggctgtttatattggaccgctctacgttttacttagcctatgagtattataaactattggatcgaggctttgagcttaccttcctctggcgtctcaccgttttcctctccgttgtgatccactcgatttacatgttcgagcatttccttagatctcatcaagtcgtaccacctcctcctccacctcaatctaagagtgatgagactcccggtaattatataaatcggtctagcaattgtttttctctcgtttcttgttttatgctaatgtatgcggtctctgaaggtgaagtgcgcgagcaagtggagaagatgaaggagttagtggaagatgggaagaagagggtgacagttatgcagaacataatccactcagttcttgaaactcaaagaaaagagtggggagaatttcttgatgagttgagcaaagatgggaagaagacaatgacggaattagatggtatgatctgctcacaaattggaactctgagggacaacatgcgcctcaatgttgacgagatatggcaagagctccgagatgagttgagatctaaagtcgatgaggatatcaaagcttcgagacaagatctaaacaaagatgttaaatctgtggccgaccaactccgcgagacataccttgccgtccaagaaaccatcaaagaagccaagactcacgagacctaccttatcaaccaaaacaatagacgggtgataagaggcgaggacgttgagggatttaccgagcggagcaagtgcaacaactggcgtttgaggcggagattgccgcagaggagctctcaagtgcgacggtggagttggtggaggcagggatcgagcaatgggaggaggacaacttcgactatattactaccctccgtcacatgtatctcgatcatatctagtttatttattggactctattgtgtctagctttcttgcagtttttattttgttgatttgaaaactatattctccttggataaccctggttttgttaattgttgcttgtttttgttttgatcattgtttatctcgtctccaattaagttaacttacctataatcatgtgttatttgatataggaatgggagagttttttggtatggtgcaatttggttatgcctgcaaggaatgcagttccaacaacactactgttcagatgattagagaataaacatgttgcagttaacaatgctactattgagttttaggttctcaactgtgaggaaatatatatatggtactgcttgatgcattaaataaatgtgtccatctatatattttggttgaaatggaaggttttttgcatgactgatatttgttttgccggtttcaagactaatcttgagaaccacaaaatctatctcaacattgaataa

SEQ ID NO: 192817 - DNA, 197 bp, Arabidopsis thaliana landsberg
ttttatcaaagacatgcgttttatcggatttgaattttaatgacacaacgaccacattagtatatatatttttagattatatatgttttcaccttgtaaaactttttgtgatatccggaaataaggcgtacgataagactgagataaaactccccatcaaatcgatacgcgaaaccacggacccagcgaacacatga

SEQ ID NO: 192818 - DNA, 328 bp, Arabidopsis thaliana landsberg
atgggggttattgtgaaaaaatataatccgaatctgccgcaggaacctttgccttttgatcttcagatcggattgactaaacaattgcgtaatgtacctttaaagatttatattaccggccatcatttgtatcaatgggatattcgctatgataaccccgcggatgtaaaaaatcaaactatttttggctctgaagataccaccacggaagataaatcttactttgttgataagctgttccgtcacatcaatattggcgcggaattgttaattgctaagcgtctgactattagtgcgggctacaaccatctccaccggggcgaattga

SEQ ID NO: 192819 - DNA, 192 bp, Arabidopsis thaliana landsberg
agacttttgagattggatcgttccaatgagtacgtgaaaagcttgaaatcgaaatcgaaaatcaacgacgtctctgcaacgacaacagccatgagaggacgggatcgagacgaaccgcgcgttcgttgcttgctgtttttgatcggcaatggtattggtgattgtgaaattacgatagtacccattggttaa

SEQ ID NO: 192820 - DNA, 103 bp, Arabidopsis thaliana landsberg
tgaccgacccagagaacgacgtcgtgtcattactcataaccctaagatgttatacgatgtcgtttcggatggtcaccaaagtatacgtccgttgacgtcttga

SEQ ID NO: 192821 - DNA, 339 bp, Arabidopsis thaliana landsberg
atggtcgaaggagacactatcttgacagtccaacaatcatcggaagcacaatgcaactttgtaaactttgaggcatttgattactgttggaagttgattctctactcaatcatccaattgacaagaagaccaaagaaggagaagaagtctcaaattgaaagaacgaagaagaatatgtatgagtcgtcaagtacaaaggaagaaaaggttggtaagatctttgacttgaaaattaagacagaaggtatcccacttcacgtaagctaaccactcctacacaagatgaaaaagaagaaacaaatggaatgtgaggaacaagaaacgaaagatcaaaaatga

SEQ ID NO: 192822 - DNA, 262 bp, Arabidopsis thaliana landsberg
atgatattgggagaaagagtggaacgtcgtgctctcaccaaatcacataagcaagcagctgcttccgcgtcagatagattgcgaatgagcgtacagcagggctgtgccagtctaaaatctaagaagttgccaaaaaatcttaggacattggaacatgtcattatttggttggcattcctgggacatgtgccacgtggaggaggtggtggttggaatctcggaggagggggtggtggttgggatttcggaggagggggtggtg

SEQ ID NO: 192823 - DNA, 150 bp, Arabidopsis thaliana landsberg
gtggcatatgccacaggaagaaaacaaaagtttgttagagtaggtgatgccagtacagtttctcagttggtgtcagtatgcgtaacattctttgtgaagatagatgttcctatccgaattatttgtcatggttattggcaggttgctaag

SEQ ID NO: 192824 - DNA, 1515 bp, Arabidopsis thaliana landsberg
atggagatttttattctgaatcaggtcctcaaccaccttggttaccaaaactactttgtaaaatctcaattggttaatataattcagtttgcagaaaaaaggtactatgcttataatatattgtaattctatactaataataaatactaatcaaaactattaaataataaatgaaatctgttaaataaataatataatagtagattattcttttagtgtgatttttggtgttatggttggagaggacacaagttttagcgtcaaaaatggtgtaatttaaacaccataatggtgattagccttggagatatcctaacacacaatattacataataaatttataagaaaattaacttataaccctcagtttctttctacccagtttctttctttctcattcggttttcactttctctaaaaaataggtacttccgcatttaccctcttctgcttttgcataacattgatgatgatcacagttgtatgaggtctgctgcttcttgagatgaaaaccaacaggtttacggtggaagaaacgaggttacaggaagttattttttatgtttttctaaaagtggtcgaattgctgttattgttgatccatatgccttatcacaatcttcatctatatgctttatcaagcggattaagcggttctagtggaacaagagcggatcaagcggttccaaataaatgttgaatggtaaaagcggatcagttattacggattctattatatattattaaattatgattttattttaaatatagtaaatagatttattgtgataattatgaaaatatttaatattttttaatttaaattcaacagtaaaaaaaaataaatatctaatattttgattttcccaaaacagatctgcaataaaattacaaatgattaatagatataaaataaaaaaataaatttatgcatgaatatatcttatctcttcaaatagtttatttaaatatgatatttttatattattatgtatgaaaatactcaaaatagttaaaattttatgtattttaaatatatatttcattgtattatgtttataatgttatgtaattctatactaataataaatacttaccgaaactattaaataataaaaataattttaaataaataatataatagtagattattcttttagtgtgatttttggtgttatggttggagaggaaacaagttttaacgctaaaaatagtgtaattggaacaccataatggtatttagccttgaagatgccctaacacacaatattaaatgataaatttataagaaaatcaacttataaccctcattttttttctccccagtttctttctttctcattcggttttcactttctttaaaaaatgggtacttatgcatttagctagggggtgagccgctattaagctcttctgctcttgcataacagtgatgatgaccgcagttgtgtgaggtctgctgcttcttgggataaaaaccaacaggtttatggtggaaaaaacgaggttaaatga

SEQ ID NO: 192825 - DNA, 809 bp, Arabidopsis thaliana landsberg
atgaagaagcttctaaaagcaggcataaatgtagctcgattcaatttctctcacggaagccatgagtaccatcagaagactcttgacaatctacgcaccgctatgcagaataccggcattctcgctgctgttatgcttgatacaaaggtttatctttctcttcttttgttaaggcttttgttcttgaactgttttttcacaagtgtgtaaacattaattgggtgttgatctagattgtgtttcgttatgattttgctcaagactgtttacactctttgtagttgagttgtgaaatgttcaagtttgattttagctccatgcgaaagaacacgacttagaacatcgttgatcttaagagtgtcgttgttttacattaggcatttagtgttttcatactgttgatggatccctaggtctcagaaacatgtgtttattgatgacgttggctcaaactagcaactgatagatcttatgtgttacttagagaaacataatagttggagtctatgtctatgttagaaccatttcagtaaataatatgagtgttacatcacaggggcctgagattcgtaccggtttcttgaaagatgggaaccctatacaactaaaggaaggccatgagatcacaattaccactgattatgacatcaagggcgatgagaaaacgatttccatgagctacaaaaagctcccagtggatgtgaagcccggaaataccatactatgtgcagatggaagcattagtcttgctgtcctgtcatgtgatccaatcgctgggactgttatatgtcgttgtgaaaattccagcc

SEQ ID NO: 192826 - DNA, 440 bp, Arabidopsis thaliana landsberg
ttatggccttcaacctccgatgctcggaatctatgccagacttttcgaggatcgggatgattgatgaggacattccgaacgtaccagacagaggacgctccccacttcgtaactttagatcccagatccgagctccgtgtgcacttatcagggacctttcgagcagagactaagacatcgcgatgtccttcattaaggctctcgcggctcaacacaaaaaacgctcaacggaaaagaagaaacttcgaaagaagatcaacaaaatgctgcgaagagtcaccgtgatatcaagggagttacacaccctcaactctcaccccggagattggatcgaactcggaatcgcacaatttgctcgcatcccggattgtatattgcccattcttgacattgccagtcaaggggtcgaggtgttatgcaagacgaggaggatttcctag

SEQ ID NO: 192827 - DNA, 141 bp, Arabidopsis thaliana landsberg
gtaggaattacaaaacctagatttttttgggtgacaaatggcaacatacatgaaaagttaaacagtatcattcttgtgaacggcaagacagaagtgttggtcatcaatggacacaaaagtcagcttggagaacacaaatga

SEQ ID NO: 192828 - DNA, 362 bp, Arabidopsis thaliana landsberg
atgacaagacacgtgtcggtgtcagccaatcagttcccgacctgcaccaagcgaatccgagaccgccggtaactttaacaatcatcgcatctctctctcatcagaaaaaggtgaaagagaataaggaggatatacagttaccaaatccggcaaatattttttctgtgattattaggtcgttcccaactatcgataatacttgagcagcctcctttagtggtagttaatgaaaatgataaaccgattatttgtctgggcgtgtctctttgaaaagtcttctggttctagatctgcacgttgacctaacgtcggaactcgtcacctgtgactgtcacgtgcatgcgtctaaatcaactatttag

SEQ ID NO: 192829 - DNA, 67 bp, Arabidopsis thaliana landsberg
gatgggttttgggattggagggattaccctggtgttatcggatatgtggtgaatcaaggatttcaag

SEQ ID NO: 192830 - DNA, 78 bp, Arabidopsis thaliana landsberg
aacaccacaccacgatacagcgtttggctgcaaacggagaatctaagtaatcgtgggaaaagaggcgtcttcaagtaa

SEQ ID NO: 192831 - DNA, 72 bp, Arabidopsis thaliana landsberg
cgcgaccgagcttttggtggcggtggggacacagaagaattaaagatgatgatggattcaattagcgtttga

SEQ ID NO: 192832 - DNA, 236 bp, Arabidopsis thaliana landsberg
atgcagctcatcgtctttgaatttcattctttgattcccaaaagggcgtcgatgctttgcaggtatgtcttctgacattgatttccaagagtgttcccacaaccgtgatgggtttgctacttcacaatagattagtagaaggacaaacagatgccgtagttgaatcggggttgcccattgatttgcttcatccatcgcatgatgccactctttatcgtcgtctagcaaccctctag

SEQ ID NO: 192833 - DNA, 532 bp, Arabidopsis thaliana landsberg
atggaacgtcaagtattgaaagaaaaattgcaacaagtaagctgatctttttcttcattgtcttctagaagtcttttctggcgctgtttattctcttttagtcatcttggatgtgttgtttgatttcaaagtctgacttctgactgagcatttgttcactgtgacaggaaaaagagcagaagctactgcagaaagcaattgttgatgaaaataataaagaaaaagaagagacagagtcaagaaacgggataaagaaacagcaagatgagtcggagaaggagcagaagcgtagagagaaggaacaagccgagctaaagaagcaacttcaagtacagaaacaagcttcaatcatggaacggtttcttaaaaagagcaaagatagttcattgacccaacccaaacttccttccagtgaagtaactgctcaggagctgtcatgtacaaaacatgagaatgaaattggaaaagttgttcaggcaattgacgacgccttttcaacaacttgtgaagctacagttgatgatattcgcag

SEQ ID NO: 192834 - DNA, 204 bp, Arabidopsis thaliana landsberg
gttatacgggtgaaatggtcgcttcatgctagagaagagattgtgttcgagcttcttcagcaactaaaaggcaatagaacaaaagacttgctagaaggaataaaaaagagcacccgcgatatgatcaatgaacaagaggccgtgcgaggtcggttattcactatccaagatgtcatgcaaaacacggttcgagcatggttacag

SEQ ID NO: 192835 - DNA, 1213 bp, Arabidopsis thaliana landsberg
atgcatgaaagaccgaccaatcctattcttggaaaacctcacgacaacgatgaatggctggtgtgatgacacctgtcaagatctacaatgacggaattgactgggacccacactttccctccacgtgaggtcatcaacgaagaaagccaccgatgataccgacgtgtatggtcaagatctgcctaaagcagatccctaatcacacggctcagattctctcagcggctattgtaatacttatttcacgatccaacggttcagtttcaatcggcggtgaccgtcctacagtgtttcccgggacttgtgctctatcgcgcaattggtatgcaatcttcaagctagcataacattaaaaactgcgatattttagtctaaaataaattaatactttacaaaatactacattttaaaaatacgcattattatttgaaataattggtagcttcgattataaaaagaaacatccgtgctcagtgcctggcaacatctgtcctctcgaggttagggttctttagaaagtttttattctatcaaaacgatcctttggatcttgttatgagagttaattaatttgaagattaatatgttttaaaaacttctaatttttatctttgtcataaaccttttaaattttattcaaacttatagggttttcgatcgtattatttgatagatcgtcgccactaaaacgtatataaacatctctgttttttccttgatttatccttccaaatcttatttaatcgtttttaaaaacctaaaatttccaaattataatcaatggaaacaatagcagttcaaaatgcaccgggtaaacaagtttcgggtttgagaccattcaagaaccctaaaagaaagagttctcgtggttctctttcaagatccggaggaagtttggctcttcctcttaatccaacgtcgtcttggggatcttctccggcatatccgccgccgcatagttactctcagcctcctcttctccctctaccacgtgtcaacagctcaactgttcctctgcaacgcgtcaacagctctcgaccacgtgtcaacaacaactcttctctcaatcgcgttgctcagacaaaagctatttctgaaacacacatgaagaaagcagagttcatcgaatctgcgagactgactcgaaccggttcagtgccgatccaggcgaaccagttgcgtgattttcctgaaggattcgatggctaccccg

SEQ ID NO: 192836 - DNA, 46 bp, Arabidopsis thaliana landsberg
atggggaagcctgtcccatcactcctcatgctcctcctcagccaag

SEQ ID NO: 192837 - DNA, 439 bp, Arabidopsis thaliana landsberg
gatgaagtataccgggagcagacggtggctgcctgccaggatgtcctaaaacggctggtgcggcctgggagtgccttccgctactcgaggttcgcgtcgaacattacaacgcagccagaaccgttgcatccttctcctgcggtgatgtacatccttgtgctgcagcggatatgctcagccgggggtcggaacggccggcatatcaggatcgccgtattggttgtggtggtgttgatgcgtctgcttccgcacgtgctgtgctttcgtgatgccgcacggtgcatagggcacatgttatatttcatggtgtcaagctgcttctgctgctggcatgcagggaatgcagactggtggggctgctggtgtactacagcctctcgactggaacgggtgctgcagacgctgggggaggagtactgttgcatgctacagaccacag

SEQ ID NO: 192838 - DNA, 52 bp, Arabidopsis thaliana landsberg
gtactcttactcgactagcacgtcgagtacatcaaccgagtaagatcaaaac

SEQ ID NO: 192839 - DNA, 239 bp, Arabidopsis thaliana landsberg
aggttctagataagtgcatggctgagtatatagacgacgacatcctcgacgatttccattttgagaagggatctacacatgaaagaagattgaaaagaatgagatatagagagcttaaggatgatgtccaaaaggcatatagcaaagacaaagagtctaagattgcgcggtcttgtctttctgcttcatcttctccttcttcttcttccataagagatgatctgcacaacacaacatga

SEQ ID NO: 192840 - DNA, 509 bp, Arabidopsis thaliana landsberg
  unsure (1)..(509): unsure at all n locations
atggttatagacaaatcggtgctgagtttcattggcatttatgccggtagcaggtctgtctatggggctccgctatggagttcgtcgtttatcatagcactcgcagcggctgcggtgttttctcgaccatcgctcactcgaatagccctattttttgctgtactgttggcaccatttccgcttgttgtgttcgccggtggctctatgccattgcgcacatttctcgctgtccctatcgtgatgtgggtctgcacgataattgccttggacgggcacctcacaggtttgaggatagctgcaatagctgtggtagccctgctggggttgcagaccgtggcagcaatcagccagtatcaggcgaaccgcgaacttgttgggaaattcgaccagtcgacggccagagcgctatatcagcggattgccgaggtcgcggatctgcgcatgccgcagaaagacgacttcttagggtggatcgatcggaagccgatgtatccgatagctctgganac

SEQ ID NO: 192841 - DNA, 282 bp, Arabidopsis thaliana landsberg
aaccggggcgatgagccgccggagatccctgacgcggccatcggcggggtgcgggagacgatggaccggatgaccgggtcctacctggagcggaggggcatgaatcgttactgcgacaagtgcctgggcacggcccggttcgcgtacctgatgacgcgcatctggtcggaggccaagttcatctgcgtgtaccggctggggaggggcgtgatcgcgtccggcattgaggcctgcccgtgggggctgaacgggtacgggttcggaccctacatcgtcgagtga

SEQ ID NO: 192842 - DNA, 432 bp, Arabidopsis thaliana landsberg
atggtggttggatccgttgatgcttatgaaagtcaaatcccacgtccgatgcgacgacaaatcacaaaaaagggacacgcttatatacaaaaggctttgaaagatgatcctattcattttcgtcaactatatcgtatgaatcctgaggtttttgcggaattatgtcatcttctccaaatgaaaacaggtttgaaaggtacaccacatgtatgtgtcgaggagatggttgctacctttttgatgacagtgggccaaaattcaagatattgtcacacaatggacactttcaagagatcaaaattttcaacaagtattaatttccacaaggttctcagagctttaaacatgcttgcaccaacattgatggccaaggttacaaatacagtgccctcaaaaataagcaaaagcacaagattttatccttacttcaag

SEQ ID NO: 192843 - DNA, 384 bp, Arabidopsis thaliana landsberg
gggatttcccttatttgactcgcctacaccaactcggaaaaattacaagtcaaatagcagagagagagcgagagagagagagagagagagcatgaaagttacacagaggagactgaatcttggaggaaaacgaggtggtggaaagagatagcttgcgcttgagatgagttaagctaagagagggaaaaagacgaccatttgacggaagctgaaatgtctttgaagctatgacgctcaggctgcttttaccaaaactctccagtccctcgcctcccttctccaccgcagattccaggacgtcgagtaagatataatgaattggacgtcgagtatgactttgaaaccaaggtacccaaatgtaacagaacaatgacatgtcggtga

SEQ ID NO: 192844 - DNA, 522 bp, Arabidopsis thaliana landsberg
atgaaggagatggctgcattgagagatgctgccgagattcataaggcggagatgagctcgttgaataacgaggtcaagaggctcaatagtcgagaagctgatcttcagaaagagatcagcgatcttcaggtcgcattggttgctgtaaaagagcacggggagagagagtgcaacaggttgcggagtgaccaagctgctaatgtcgcccgtactacaaagaaagcccaagctcgtcttgatagagcgaaggcttaactcaaggagcaagaggacctcgtcgggccaaaggtggatgctgagaatcaagcaagaggcgctgaggagatagtgggcatccttatgcagagaggtgcgaagattgcagcatttgaacacagcggccttaaggagttaaccaaaagggcggccgacgaagttaatgccttgaacgttatcgagctcggggacgatgatctgaacatgtccccagatcagctcggtttttcaaggcaaacctcccaagttgctccagtggcggactag

SEQ ID NO: 192845 - DNA, 45 bp, Arabidopsis thaliana landsberg
atgatggtggacatccgggattttgataacctggaggacaataag

SEQ ID NO: 192846 - DNA, 361 bp, Arabidopsis thaliana landsberg
atgcggttcgcgagtttgctaccctcaacatgtttcgtaggactcgacaagctcaggcttgtccagaagacattgcaatgtgggccaagaaatacatctctctccatggccacgagttctcatactagtgttttgaaactccatgtggcaaaaaaggtcaaccaaaagtaacccgtgtttttacgggagacaaagcaaaagaacacatgcagaccgaaaagattgatatcatcgttgcaatcatcgtatcatgtgatttgtctcttctatttagagttcaagcttctgttgtatatcatcgtatcgagtaacgtccattttgattaacccaaccaaaccaaatgcagaccgaaaagattga

SEQ ID NO: 192847 - DNA, 350 bp, Arabidopsis thaliana landsberg
atgttctcggacacggatcatggaaacatctcgaaactcttgtctatccatgacgctaatagagctgtgccacacattcgtcggggcgagttggtgaaaggcgatgcaaccaagaccattccagaatatgtacaaaatagcccgcacttgattgtcgcgatgctctatttggatttcgatctctacgagccaaccaagattgctcttgaacaccttgcgcctctcgtacccaaaggaggcattattgcttttgatgaagtcaacgtcgcgcattggccgggcgagacgaaagctctcagatcatattttgaattgaaccgcctgaagctgcggcgaatgccgttcgagcc

SEQ ID NO: 192848 - DNA, 1642 bp, Arabidopsis thaliana landsberg
  unsure (1)..(1642): unsure at all n locations
atgaaacacttcgatatctcccttttgctggtggtctctcaaaaagtgatgtcggatgtcaatgtgctttgtgcggctgtgttcaacaagattttccgccatgcgantagcactttcattgtcacataggagtgggactttgctcagattgtagccaaagtctcggaggtttgcctcatccaaagcagtttcgcgcaacactgtcctgcagcaacgtactcggcctcagcggtggatagggcaacaaatgtttgtttcttggaactccaggataccagggaccttcctagaaattggcatgtccctgatgtgctcttcctatcaaccttgcacccgacatagttggagtctgagtatccaatcaagtcaaaggtagacccctttggataccagatcttgaagcaaggcgtagaaactaaatacctaagaattcgcttaacgaccacaaggtgacattccttggggtcggattgaaatctagcacacatgcatacactaagcataatttccggtctactagcacaaagataaagtaatgaacctatcattgatcggtatgccttttgatcaacgggcttaccttctttgttgaggtcgagatgtccgtcagttcccatcggtgtcttcacgggcttagcatccttcatcccaaacctcttgagaagatcttgagtgtacttcgtttgggagatgaaagttgaaagggaaatgtgcccttggcacatttctaagtattttggtgattaagtgtccaacacaaatggttatgtgtaaaactatgacaaatggtggacaaagtgcaaatcaatacaaaggtatgattctagacttagtacattggtttttatgtactaacatatttgtctaagtgctagaatcagagaaagaaacaaatggaaaagacttggctcgagcagccaagactctgctcagtctgggtgcaccggactgtctggtggtgcaccagacagtgtccggtggtgcatcgaacagtgtccggtgcgccaggctggctctggtgaaaaggccgctctcgggaattgaacggcagcgtacggctataaatcaccgcactgtccgtgggccaacggtcggccgcgccaacggtcggcagcgcaatccgtgcgtgacgcgtgccgagccaacggtctgatggggcgacggacagtgtccggtgcgccaacggctacaattctgcaacggtcggctgtgccattttaggaaggagatccgcaccagacaatgaacagtggatgtccggtggtgcaccggactgtccggtgcgccacccgacagaaggcaagaattgccttccaagaatgcctccaacggctcctagctggcttggggctataaaagggacccctaagcgcatggaggagtcacctaagcatactttgagcattcttaatcattcacactccatctccgcgcactcgattgactttcttagtgatttgagctccgttctagtggtgaactttgtgctatttattttgagctcaagtcttggctgtgtgtgtgcgttttgctgtggatttgtgtgtgttgcttccctcccttactctagtgctttcactttgattcttattgtaagggcgagaggctccaagttgtggagattcctcgcaaacgggattga

SEQ ID NO: 192849 - DNA, 490 bp, Arabidopsis thaliana landsberg
atgcttgatttagctcagcaattgcgccttcggtttgaagattcatcgtgggagggtcaagtcctaattgtccagccatgtgaagaacactctggtgcaaagtggcctgaagtagatgatattgtaagtatctgactttgctagtcaatttgaagattatttagaaatcaatgatgagatttcattcacctgactgtaaggtccaatgcagctaggtgcccagcaagatatactttgtacatggagaactcttttgctttcgtcattcgcgactaaaacctcgatgtaagcttttccaagacccgcttgtaccaaaggaagttctattgtactacgggaaggaacaccgaaagggcacttctcttgtgtgataaatttcacatatgtctcattcgccacagcaaattcactcatgtcagagatatatagatgaatgtacaatacatgctgccagttatacccgtgttttaaaagctgggattcaagttct

SEQ ID NO: 192850 - DNA, 319 bp, Arabidopsis thaliana landsberg
atgatttttacctggttacgtttccaagcggagattgagaggttaaagacggagctgtccacctcgaaagatctcgagaaaggttatgcttccaagatcgggatcatggaacagaagatcgtggggttggaggcagataagcagacagcgaggaaccagattcatcgcttgaacgaaaagaaggacgagctctctaaaagagtgctgcatctcacttcgattgtgcagggagctaacaaggcggttcacaatgctaaggttgatctggctgcttcgtattcaaagttgctagatgagatcaagaagaagtgggtcgcaa

SEQ ID NO: 192851 - DNA, 623 bp, Arabidopsis thaliana landsberg
atgtgccgtgaagatgacggagacgaagatgggacttggagaagaaaaaggtaagctgaaagtagtcacgagctgattggtacatttggactcttcttcctctttacttgtatttacgctttctctcatttattttctcttctattggtcaatgatcaacatgaatagtgtatttgacaacatttaaccgaagtaccgaaccaaaccaaattcggttgtaaaatcaaacaaatattggacgtgattactgattagtataatcttgtaccactcacaaaattgatagcaaaaacgatgcaaagagcaatattcttattatttgttttggtgttgcgctctctattcgttatttatttattttgtactgcttttaactacagttttgttcgttcgtcaccgattgatcgtttacaattacaaaagaatatacacagttgattttttggtggcatatctagaatccatagatctatgcgttacttataaagtttatataagctgaccacgactgagtatggtagcgtgattgttaaataactaaacaattatgagataccttttcacttttcacttgcatttttgtggaatatcatcattttaggtgtgggccgattagagaatga

SEQ ID NO: 192852 - DNA, 429 bp, Arabidopsis thaliana landsberg
gagattgaatgtgaagggaaataaaattaacgacaacgatgagatctctttctcacgatccgatgtgaccttcgccggacatgtctccaacagccggagtttgaatttcgaatcggagaataaggagagcgacgtcgtttctgtcatatctggagttgagtactgttccaagttcgggagcgttaccggaggagctgataacgaagaaattgaaatctccaagccgagcagcttcgtggaagctgattcctctcttggatcggccaaggaattgaagccggagcttgagatagtcggatgcgtctctgatctcgcttgctctgagaaattctcggaagaggtttcggattctctcgatgatgagtcatctgagcaacgttcagagccatattcacagtattccgacttcgataactcggaatacactcc

SEQ ID NO: 192853 - DNA, 105 bp, Arabidopsis thaliana landsberg
aattgttttctaagactcctagttttcgaaacagagcagttgacaagtaaagcagagacacccaattgtctgggacgaacactagggcaaacaaccggtgcttga

SEQ ID NO: 192854 - DNA, 226 bp, Arabidopsis thaliana landsberg
atggatactattgacgaaattctcattggtttctccatcatcggcttgatcgtcatcgtgattgctaactgttgcgacaatatagatccccctcccacgagattacctcccgagacaatccatcaaactgtacagcctcaacaagacattgaaaccggacagagcaaagccctagtgttcaaagatatcaaagaagaagaaggaggaagagaagaagaaggtggtg

SEQ ID NO: 192855 - DNA, 89 bp, Arabidopsis thaliana landsberg
gctctctctctatctcccacggtcggtttacatacatatctaaactcaccaccggagctccgacgattttttcggccaccttccgatcg

SEQ ID NO: 192856 - DNA, 670 bp, Arabidopsis thaliana landsberg
atgcttacaatatctcaatatcacattttgtcagttgtcaccatatatggccgctgcaagcaccatcgcctgatagcggactgcagcagctgctaccgtgcgtagaccactactgctcgctagccaccaccacgcccgccatcgtaagactgtgttcagcggttcccctaaatttctccccctatatccaattcacgtgtcacgtcagcattctctttccccctatatctccatgctctacagtggttccctctatatctctactaatcctgaagggtggtgcgagggcgtccaccatcaccgtgcccccgcccggtcccgcgcatcccacagccgtgcccccatgtgtcgccctcagctcccggaaaacctagcgcgttgtagccgccatcaatgcctccgcacaatcccctgcccgctcggccgcgcacgcttggcgccagtgaccgccgcctctgctccctcctccatcccgcgcgcgccccgcgacctccgcctccccctccgtcatcccccatccacgcgcctcgccgagaatcccgcgcccatgcccgcccctccgacataacgccaacgggcgttcctgtcgtagggaaatggagagctagcatgtgggtgcgacggtgtgggtggcttcttcgatcctcgagcgtgctctgatcactcacac

SEQ ID NO: 192857 - DNA, 706 bp, Arabidopsis thaliana landsberg
atggacaaatccatggaagtatactcatgtccacctctaaacatttcaaattgcgttactgtaactcttacagatcgtaactacttactgtggaaatcacagtttgaatcttttctctctagacaaggtctctttggttttgtcaccggcagcatctcagttccagcaagcaccattccggttcctcacattgaaggtcacacagattcagtcccaaatccagactacgacgcttggaaccgttcagatcaagttgtcaaggcgtggcttctgggttcgctttctgaagatattctcaatgtagttgttggatctaaaacatctcaagaggtatggctaaatcttgctggtcaattcaatcgtatctcagcatctcgtgtttttgagcttcagcgccgtctccatggtttgtcaaaagaaggaaaaaccattgatgaatatctgcgttgcctcaagaccatttgtgaccagcttgcttcagttgggagtcttgttacagagaagatgaaaattttcgcaatggttcatggtctaactcgtgaatatgaaccgctcatcacttcgcttgagaataccttggatacctttcctggaccaacatatgctgaaatcatgcattgtctcaaagtttttgatgataggatgcaaagctacaacacaaaggaagtttctccgcatcttgcttttggtacattcaacaatcgag

SEQ ID NO: 192858 - DNA, 794 bp, Arabidopsis thaliana landsberg
gaaaacctaattgagctctcacgagtcatagaatggccaagaacagtagaattccatcgatttcgtattcaactgattaaatccataatcaccgaatctaaatgcttagaaccagctaaaaaacgcgaagaaggagtaattgaaggtgaaatgaattcagaaatgctatcaaatctgaagaatcaaaagagagaagaagaagaaggtaaggttctatcaccggaaagagctggaatcatggatcagaggcaacatatcatccacttgaatcataatacaacacaacacagattatcctcgagtacactagactgattcacctaatggctaatagacactaccaaaatcctttttggtgctctggaaaacctaattgagctctcacgagtcatggaatggccaagaacagtagaatttcatcgatatcgtattaaacagattctctaaatgccataatcactgaatctaaatacttagaaccagccaaacaacgcgaagaaggtcgaagtaatcaaaggtgaaatgaatccagaaatgctatcaaatctgaagaatcaaaagagagaagaagaagaaggtaaggttctatcaccggaaagagcgagaactctgggtttagccatttgtcgacccaattttccagacttgccccaaacaccgcgactcttggccacacgtatcgacataacgatcgattgcttggttccttcgatcgcggcctcgcaagctcgccgaagctcttcatcgtcggcgcttgatttcgccattgttgttgttgcggatccagcaaggag

SEQ ID NO: 192859 - DNA, 181 bp, Arabidopsis thaliana landsberg
ttcaatttcaacgaaccaacattaacctatggaaatttatctgaatatagtcagcaagagaagttgataaatgcacgcagcattgcttctgttttatatgaaattctaaggaaaatcgaatcaagtatgggccgtgcctcaaccccagaaagtatacaattaaaccgggatgaggagattg

SEQ ID NO: 192860 - DNA, 578 bp, Arabidopsis thaliana landsberg
aatgtgtaaaaaagataaagactagcttcgccaatgtgggcgcgtactcgagcgaagacaacttcataaggggcgatcctgagggcgtaattgagtggatctgcagtgaagccaaagcttttgaagaaattttgagtgaccgcggggacgtgtgcgcgttctctggtgcaaggggagttgcagctattttggagaaggtagggtgcgaacatgttaaacctttggcccaggccgaagctgctttctctattgacgatacgaaggacccctcggccgaagcaagcttaataggcggaaaattttcactgatatttgggaaaatggcgaccgaggtatggcccatgaaataatgaaaaagagcgaaaaagacattcatgacgctcgagaagcaacaaaagcggctgaaaaagctgcagaacttgaaagacagataggtattacttaatggcttttaactttgttgtttatttttgcgacttcgaactaatttataccttctacgcagctgaactatctcctccccagagccattcgacccactggtcgaccagagcaaagaaggcaatagagattattaa

SEQ ID NO: 192861 - DNA, 158 bp, Arabidopsis thaliana landsberg
ttaatctggttcaactacgaagttcaaatggttcaacggacatagttcatccagttcgactgattagttcaaatggttcatccggttcgactaaagtccaaatggctcgactaagaagtccgaatggttcgaccaataaagtacatccgttcgactga

SEQ ID NO: 192862 - DNA, 92 bp, Arabidopsis thaliana landsberg
atggtagaggaaagcaaagacgcatcagaagccatggatcaattaagcccttttatggactcgagcaagaataagagagacgcaatgtcatg

SEQ ID NO: 192863 - DNA, 416 bp, Arabidopsis thaliana landsberg
atgagtgaaggtgagaagatttgagattacctcagtgcagactccaacaatttcatcaacagagtcttcaaaaagatctctttttgatagtttgattaacatatggtccctaaatttctcagtctcctggttatatcacacatcaattaggtttcgatcatccatcaaaaatgagttgacgaagaagaggaaatgagctcacagcttcggcgaattcaggtatggcatccggaaacttgtactcagcagctctgcaaacgaaccctctccgggacagtgaagatagagaaaagtccctcactttggttctacaacgctgtttaaaaaactgggtcgatttgattgcgcaagatactgcagctggtgaagagataattggaagagcgcaacggaaggaaaaagaagaattgacttga

SEQ ID NO: 192864 - DNA, 184 bp, Arabidopsis thaliana landsberg
taatagaccttacagtcgtataaccttatacgaactagtccctcagctgactaatgcgcgcacgtggaaagattccgaaactagcgaattgattcgagaacccggaacgcacgcaaagatgcatactcagcataatacatgctcaaacagtcttgtgaaaaacgaccagtacgaaagtgcatag

SEQ ID NO: 192865 - DNA, 439 bp, Arabidopsis thaliana landsberg
ggaaatatcaaaccatggattggtctattaggttaagagtcgcctattttgtagctgaagcattggattattgcaacactgcaggctttgcatcatacaataacttaagcgcttacaaggttttgtttgatgaggtatagaagaggaatccttttcatctatatgccttctcgtgtggtctctaaaatgtcataattgttttaatggatgttgaaggatggtgatgcatgtctttcttgtttcggcttgatgaaggagattaataatgatcaaattacaacaggtaattaattagcgtttctctcttcagatttattataagaattaatgtgatgtttattttatcattgtaggaagtgtgaaccctgaaaatgtgatataccgatttggtactgtccttgtgaatcttctaagtggaaagcaaattcctccaagccac

SEQ ID NO: 192866 - DNA, 135 bp, Arabidopsis thaliana landsberg
atggagaaaaggaacgacaaatccgagccgttgctgctgccggagaatggatccgacgtctcagaagaagcgtcatggatggtttatctaagcacgatcattgccgtttgcggttcctacgagtttggaacatgc

SEQ ID NO: 192867 - DNA, 254 bp, Arabidopsis thaliana landsberg
cactgttctcggccatcagcagttgcagagacttggagggatttcctgctgtttatagtagatattgttctagttttcgcagtcatcacagtgtggatctcgcggtgagtattagctggagagagatgcatagagtcagcgggtgtctctcgtttgctaacttcgcttgtcttcacaggatccactcgaccgatctccacttcacctcaccaccggctcgccaatttctctacgccacggatcgccgtccatag

SEQ ID NO: 192868 - DNA, 1463 bp, Arabidopsis thaliana landsberg
tgccagaccgagagcccggacttcgctgcctcgagtggctgcaggaggagttgctggcgctccccgccatcgtggaggggtttatgtcctatgcctccctggtcacctgcgaaggggcgatgaacgcgctgtcccgcgaagggtgccggcactatgaggtcttcgaccaagctgatgaggatttcgagcgcgatatttacaaggttgaggaccctgtggtgaaggaatccgcgggaccctctacgaccggatgtggggccctcacggtcgggaggtggtcagggagcggaccgagacggcgaggggtcaggtaatgtttggcttttgtttggtgtttgttgaatgtgggttatatgtgggtttgttgaatctgtgtgctgtgtctcaggcggcgcgtggcgagagggtggatgacttcggggctttgaacagcgtgctgcctgacccggagctgaacccggtggcggctgtgtccgaggccgccctggagccgccccaggaaaccgccgaagtgtccatgatgcccccgcagccactgcggccggcggaggcctgtcgccaactgccgcgccgagggctgaggatcctgcgaaggtggcgacggaatcgacagcggaggatcccgcgacggctgggtcttcgcaggtggcttagtgggtgtgggtagttagggaattttcgatatgttgctgaattttggttgctgcgtaggttcaagattttgggcctacgcacgcaaccgccactactaattttttggcggcttcgaccgtggatggtggtaataaatgtgatgggtctgcatctgagttttctgattttgctgactctgggagctcggttgagtggactgaggagtcgtcggaggacttggactactttgcggccttggatgtggcagcggcggaggcttcaccgcacgctacggacacagaagatgtgcctggtccgagcatcgggcgccggcggcgaagggcggttgcgaacggtagggtgagtggggcggagggaggtcggcttcgtgtgagtagggctggctggcaggaactgttgtctttgccggccgtcgtgagcacaggtgaaggggaattgcgaagtctttttgcgggtgaggagcttaggataatgttatttaattatagggagatgggaattattccgaaggttgagccgatgtagagtgtgatgccctcgcttgtacatgtgtaatggcttgtatgatgaggttgtgtgccttcgcacattcggctatgctcgcgaaggcattacgtacttggtctggtgtatttgttatgttggtctggtgcgcatgtagtcggtctttgcgcggacagtttggtgtagtcgttttcgcacttgttaagcttcgtccggctgcacccttaagcgactgttgcacggatagtcttcgcagaagacttcgatttttcgcacttgttgtgctagcccggctgcacccttag

SEQ ID NO: 192869 - DNA, 1077 bp, Arabidopsis thaliana landsberg
attcaagcctacactaagttcacgaacgagtttgacacttcgcgttgcaacaacagtgacacctttaattgagtttggtgcgataactcgacgggtccggtcgcagtgctacaactaaggaagtgtctcagtggaactttgaagtccaacagtagcctcttcgggtttcatcaacttcgttacgttgatctccaaaacaacaacttaacctcctcttcactcccttccgggtttggaaatctcaaaagattagagggcttgtttctttcctctaatggcttcctcggccaagttccttcctcattcagtaacctaacaatgcttgctcaattagacctttcttataacaagctcactggtagtttcccacttgtccggggtctaagaaagctcattgttttagatctttcatataatcacttctccggaactctgaatccaaacagtagcctctttgagttgcaccagctacgttaccttaatctcgcttttaacaactttagttcctcactcccttccaaatttggcaatctccatagattagagaacttgattctttcctctaatggcttttctggtcaagttccttccacaattagtaacctgacccggttaactaagttgtaccttgaccaaaacaagctcactagtagtttcccacttgtacaaaatctaaccaacctctccgaattagacctttcatataataagttctttggagtcatcccttcttctctcctcactctgcctttcttagcacatcttgctctacgtgaaaacaatcttgctggttctgttgaagtttcaaactcctctacctcatctaggctcgaaatcatgtatctcgggtctaaccattttgaaggacaaatcctagagcctatctcaaagctcatcaacctcaagcatcttgacctttctttcctaaacacaagctacccaatagacttaaaactcttctcctccctcaaatctttgcggactctggatctttctggaaacagtatatcttcggcccgtttaagttcagattcatacatcccattgaccctggaaatgttgaccttgaggcactga

SEQ ID NO: 192870 - DNA, 1536 bp, Arabidopsis thaliana landsberg
atgactaatccagaggatatccctagcaggatcgaggttagtgtacagtttcatattaatcaatcattcataaatgacacactaaatagtaattattatatatagtgatatatgcaacttctgaaataagtttgatgatgaacagggcaagaatgtagcaagacttgtgtgttgtttccttggagtagggtctctcgtggcatggaatgcgatgctgaccatcactgattactattatcaacttttcccagtatgactctaagcaacttttcggtattaagacaaattgtttcagtggatatataaatcagtttaatttgatatgtttacttggttaacaacagaaataccatccatcgagggtgctgacaatagtttaccaattggttgcgaatgtgtttataataacacttgctactaaagaagctaagctcaatactcgacttcgtaacatttttgggtatagcctttataccgctggtaccttttgtctcatcattgtaagtactctcatttttctgttgtaacgtcggttttataaatataaagttgtgattttgacttgatttgattcggtttggtgaagttggatcttgcctcacatggcagtggaagcgtagtagcatatgtgttgttatgtttgatcgttgctctttttggtctcgctgatgcttttgtacaaggtgcaatggttggagatttatccttcatgtcacctgacttcatccaggttaaaactagttgttttttgcaatggtagtatccatttagcttaatgttgttagttgttaaaatgtttgattattttatcaggcgttcatggccggtttaggcatagctggagctctaacctcggtattaaggcttattactaaagcaatcttcgacaattcgcctgatggtcttcgaaaaggcgcttgtaatgcctctcctacaaatttcttaaattatcctttgttacatatataaaggcgcttgtagtgttatcttaattaagctaattttaatcttcttttgcagtgttgttcataggaatagcgacattgatcgagttagcctgtgtctttctatatacattagtctttgctaagctccctatcgtgaagtactaccgcgcaaaagctgggaaagaaggggccaaaactgtttcagcggatcttgccgcagccggcctccaagagcaagctgaccaggttcaccaaatggatgagtccaagatccaaaaactaaccaagaagcagttactacgggaaaacatagatcttggaatcaatctatccttgatttacgtggtgacgctatcgattttcccggggtttctttacgagaacacaggagaacatagattgggcgattggtatgcaacgttaacattttatttaaaaaccattctatgctcatattggttacataaaaattaccatttatgttttgatgtgttgataggtatgcaccggttctagtagccatgtacaatgggtgggatgcgatatcgaggttcattccctcgatcaaaccgttagcaatggagtctag

SEQ ID NO: 192871 - DNA, 2298 bp, Arabidopsis thaliana landsberg
  unsure (1)..(2298): unsure at all n locations
atgatagacgaaggaataaccactaaggagataggtacgggttcagccaatacaagagtatcagaggtaatgaggaatgagttgatggtgaaagatacaccggttccgacggtgttgtacgatagagatgccccaccatattttgacgacccaggggaagaaggtaaagcatacctatatagcaattttgatataaaaaaactatttagccctgtattatatatagctaattatgttcgataagtaattgtttaactcgataactaaacatcttcgctaaaagtattaacagctatgttttctcttcctcgcaaatgctcttatcgtcccctaaaagatgctgattatgagggagatgatatctacattggtcggatttttaaaagcaaagaggactgcgcaacgaaactaggaatccacgcaattcaccggaagttccatttcatctacacgaaatcaggnnnnnnnnnnnnnnnnnnnntctgcgtcagcaacacatgtccatggtgggtttatgctactaagctgccagatagcgaccggttcgaggtcaggagcaccacccaaactcatacatgtagcgtggatgcaagaggagacttccacaagcaggcgtcgacggcagttattggcaagttgatgcgtactaagtatattgaagtaggccgggggcctcgcgccaatgagctgagaagaatgctacgccaagagttcagcctcaacgtttcctattggaaatcatggcgggcacgagaaattgccatggacaatgctttagggtctgccatgggaagttacgccctaatccaaccttacttcaagcgtcttttagagacatgatgcatgtgttcaagggtatgcttacatgaggaaagtcattgtaattgatgggactcacttacgaggacgatatggcggatacttagttgcagctagtgcacaagacgcaaatttccaggtcttccccattgcatttcggatagtaaacagcgaaaacgatgaggcgtggacatggttcatgactaagttgacagaagcgataccagatgatccggagttggtgtttgtgtctgatagacacaactcagtttacgccagcatccgtaaggtaacatggtaacacataatgtatctcatactaattaagttagtcactaatataccatgttttctaaaaaatcacatcctgcctaaatattatgcaggtttaccccatgtcatctcatgctgcttgcgtcgtacatctgaaaaggaacattaaggcgtactttaaatatgaacagctaggtactttggtatccagtgcagctagagcttatcgactaactgacttcaataggatatttgctgaagttcgagctaagcatggaccgtgcgcagactacttggaaggtatcgggttcgagcattggacaaggtccctatttgttgggaataggtataacgtcatgacaagtaatattgcagagtcgctaaacaatgtgttaactatggctcgagattacccggtaatttctatattggagtcaattcgcactacactcgtaacatggtttgcgcttaggtggcaagctgccagaactgaggataatatcttaccgcctaaggtgcacgatatggtgatcgagaattacgagaaaggagctggatgtgttgtgctaaagattggggatgggctatatgaggttatagaaaagagaggctcagcatttgcagttaacctatgggagagaacgtgtacagggagttccagctcctaactatcccctgctcacatgccatatcggcggctatagaagaagggctccgcgtggacacgatggttagagtccatcacacgaccccccagcttagattttcataccaagcactcataatgctggtacccgacacagaaacgctgactccttcaccaaatgatgtaggaggtggaaaattggctccaccgtatgtgcgtcgaccgcctgggcgaccaaggaaacggagattattcttaaaaggagaattcaaggtaacatatttgacatcaaagctaataaaatatttatatggtaatattattaggatgtaaccttcgcttccatttgtagcgagcatcaagagaaagatgctcacaatgcaagtcattgggacataacaggccaacctgcaatggaccaatatcggtatgtcaaatattatctgttaatgactatattatggaatatttatattatctgttttgagtgcagggtccgtagaaaatatggttcaaggacgttttttggcgctgaaagtgatggatgctgccatgattaa

SEQ ID NO: 192872 - DNA, 134 bp, Arabidopsis thaliana landsberg
cataacgtatatattgaacggcgagagagacactttatctactgttttaccatctggagcaccatcacagacaaccaggtccgctttgcagccgtcaaagtgtctaatgaccttgaaaaaaaacaccggaaaag

SEQ ID NO: 192873 - DNA, 298 bp, Arabidopsis thaliana landsberg
atgagcgacctagaggattcccagaacaagagcaatcatagttacggcgacgacgagagttcgtcagagacgaggtcggcggcgtcaccgccgaagtacaaaggcgagtcctaaccctaggcggaatgggtccaattcgtcagacgtcaaccagagccgacaagccgaagaagaagaaagctcccaagcaaaagggaggcacgccgatgacgaacaacgacctggtcgacctccgaaggagatgccaggttccagtgggggtgactatgatactcccaaggccgtcgttgcatcctga

SEQ ID NO: 192874 - DNA, 517 bp, Arabidopsis thaliana landsberg
atgggacgtgagaatagcttattcgactacaaattcacgtcgagtgcgcaagaagtaaactactcgtggactccacggcacagaattgtctcaagattggtattaaacaacacagggaaactccataggtttatccagtcgaagcaaaaccagtggatcttagcaaacactgcaccagaagatgagtgtgactactactctatatgtggagcttacgcagtttgtgggattaatagcaaaaacacaccttcttgttcatgtttacaagggttcaagcctaaatcaggtcgaaagtggaatatttcaagaggagcatacgggtgtgtccatgagattccaaccaactgtgaaaagaaagatgcatttgtgaagtttccaggtctgaaattaccagatacttcatggtcttggtatgatgcaaaaaatgaaatgacacttgaggattgtaagatcaagtgttcaagtaactgctcttgcacggcttatgcgaataccgatattcgcgagggaggaaaag

SEQ ID NO: 192875 - DNA, 245 bp, Arabidopsis thaliana landsberg
acacaatcttatcatcggcaatgtttatatcattagaaccctgctttctcatcgcagtaaaaaaagggtcatcatcgtcaatttttttgtatcgtttgaacactttctcaacgcaataagaaaaggatcatctttttcttttcgtctctttcccgtctttttccatttcattatacacgatgatttaactaacgaggaagatctagccaactgttttgatgataacggatatggtggtggcaaag

SEQ ID NO: 192876 - DNA, 1348 bp, Arabidopsis thaliana landsberg
atgctctgcaactctcattggcgagctgagctgatgggagtgttatgtgtggctctgttttgggattttgagcagtcagaggaggtgtgtctgtgctctaaacgtagttagtaaggcctcccccaaacttaaacgacattgtccccagtgcattcaaatttgaagtaagcaaggaaaatataagaaaaatgtaaatagaaagaaaagaaaacaaaactcatactagtgggttgtctcccactaagcgcttctttatagtcaatagcttgactttgtcgaagtgcagatgtcaagtggattagatagtggcagtgattccagcttgaaacgtagctattgtagataattctgcttcaacaagtgatgggggtcaatctacactagtgtgtgtcgatcgacaccaccactagcagtctgaaatctgttcctagacaataacagtcttccttatgtctccctgattttgtggagccttgcagtgctcctcctaaatctggtgcatatactattgaggcattggacaaggaattttatgcgtgtagacttgttcagcaacaggtggaaagtcaaggctgattggtgcagtctactttcagtgtcgatcgacactcggtaagtgttagtggacactactatctggtatcgatgctactctctcaatctcgatcgatattgcactgtcaaacgtcgacacttcctcaggttggtactggtgtcgatcgacacccaggtggtgtcggtcgatactatcaatgtgtgtcgagcgattctggagatcaatgtcgaacctggtcgattttgcttcgtcacagcctgatgtctcgtatatatgtgatggtgtcgatcgacaccaagggttagtgtcgttcaacactgcctctgtaacgtcaaaatcgtcactctcctcaatcttcactaactcatactcactttccattgaagcagaatgccaagaagtagtgaggctgctctcatgccatctagggataggtctctctaagatcctctgttgaccttccagaatctgttccagcattgattctatcttgcttcttggtgcgggtggagggggaggcttggtaagtagtaagatcatagatccttgtgaagctaaactattgctattctaaagcggttgctagaactgagaattctgagtgtagctagttggaccattcccagagaaacctctgttgccttgttggagatcaaatctctgattcggaaaacctctgctactaacataatcgacattctccacaagttgattgtggaccgcgttaagcttagccttgatcccaacaatcttactctccttcatgtttctcgttttgtccttgttctgtga

SEQ ID NO: 192877 - DNA, 104 bp, Arabidopsis thaliana landsberg
acaacaccgacattttgactaacgatgttggatttagtgtacgagctatgaaagtggaaaggagcacgaagttcactgaaccttgttctttactattattgtga

SEQ ID NO: 192878 - DNA, 110 bp, Arabidopsis thaliana landsberg
actttaacacgccttacggcccatgctgccgctttactcctcgatccaactacgccttaactgtctttctgggtccgttgtcttgtggtcctctgcaggcccttggctag

SEQ ID NO: 192879 - DNA, 316 bp, Arabidopsis thaliana landsberg
atgctagaagttacacatccaaagacttatacggacttcgactacaccatcaaagctataagaggcaagaagaagcttggttagtattttggagtcaaatatgactagatgtcatttgtataattgagtataagaactagaaccgcaaccgaatcttaaaagcctaagtagtgtttccttgttagaagatacaaagccaaagactcatacggacttgggctacagcatcaaagctttgagaagtaagaagaagcttggttattgttttggagtcattttggagtcaaatatgactagatgtcatgtgtatgattga

SEQ ID NO: 192880 - DNA, 1257 bp, Arabidopsis thaliana landsberg
atgaatgtgtatgaagcaaacaagtttccaattttctcctctgatctgtttgataagcaagggcaactttacaatatctccaccattgtcaacaacaagtttgaattggacatggagaattatcaacaagaaggtcgggtttatcttagtacgttcttcgctatcagttacgggattggtttcgcagcaatcgtttctacactgactcatgttgctctcttcaatggaaagtaagtcaggaatatccataatggactaacttatgcaccaatgtttgaaaatatcactaatcttcttgtttgacttaggggaatttggcaacaagtacgagcttcaactaaagctaaaatggacatacacacaaggttgatgaagaagtacaaagacataccaggttggtggttttacagtctgcttgcgatctcattggtgctatctcttgtcctctgcattttcatgaaagacgagatccaaatgccttggtggggactccttctagcatcattcatggcccttaccttcactgtaccagtcagcattatcacagctactactaatcaggtaccacatataacttccactacagattcctcaaaataacatgatttggatattttctcactttgaaaatgttgtgatgcagactccaggtctgaacattatcacagaatatctcatgggtgtgttgttaccggggagaccaatagctaacgtctgcttcaaaacttatgggtacataagcatgtcacaagctatatcattccttaacgacttcaagctaggccattacatgaagataccaccaagatcgatgttcttagtccagttcataggaacggtgatagcaggaacagtgaatatatcagtggcatggtacttgctgacatcagtagaaaacatctgccagaaggagttgcttcctccaaacagtccatggacatgtccaagtgacagagttttcttcgacgcatcagtgatttggggattagtaggacctaagagaatctttggtcggctaggaaactaccctgcactaaactggttcttcttaggtggactaataggaccggtcctcgtgtggcttctccaaaaagccttcccaacgaaaacatggatctcgcagatcaatctcccagttcttttaggagcaacagcagcaatgccgccagcgacaagcgtgaacttcaactgctggatcatagtaggagtgatattcaattactttgtgttcaagtactgcaaaaagtggtggcagag

SEQ ID NO: 192881 - DNA, 290 bp, Arabidopsis thaliana landsberg
atgttcaagcataggagatcgaggaggagtgggggcagcgcggccagcgaggacagctcgggcagtgggctttttcagggcacctcacagagccgacagaggcagcaacaacttctcgactgtctagacgaagtgcagggtgaggagggtgagcaggaggctcctcagcaggatgctcatgttcagggtgaggagggtgagcaggataaggagggtgagcaggatgaggaggttgaccctattggggcaggcagcgcgggcgacacgttagatggttctacgtccttcag

SEQ ID NO: 192882 - DNA, 88 bp, Arabidopsis thaliana landsberg
ggtttccgcatcgtgggcatgtctggcttgaggaaagaaggatcttcttctcgtggacacgcggttaacttgaacttttgcggtccct

SEQ ID NO: 192883 - DNA, 115 bp, Arabidopsis thaliana landsberg
atgttgacttcaatggaggaaaccttgaagcgagtggtttgcgcattggagaggattgaatctcgatcaatttcagatgacggtagacagctggacctcccgatcttcactaaag

SEQ ID NO: 192884 - DNA, 291 bp, Arabidopsis thaliana landsberg
aaatcatcagaattatcaaacgagaaatcaaaatcagcgaaatctccgttctcatcgtcgagtaagaagtcgagatcggagattggcgcatccattgaaatcggatcagaatcagataggaaaagaggatctagcggcggaatagaaaacaaatcggactcagaaaacatgctagggttcagattaggtatctccggcggaggagcaaccacggatgttgattccgtcatcgtcggaggattcgaaaatttattctggcttcgcttctcgatggttccacacggtttataa

SEQ ID NO: 192885 - DNA, 56 bp, Arabidopsis thaliana landsberg
ttcgttgtaatgttcctaagaaagagctaattattggtcgttacgttggaggctac

SEQ ID NO: 192886 - DNA, 891 bp, Arabidopsis thaliana landsberg
  unsure (1)..(891): unsure at all n locations
atggacgatctctctctagagaaaatcgagatttcgggtcnnnnnnnnnnnnnnnnnnnnnnnnnnnnnnnnnnnnntcccagtgacgtcgatggcttgatcttcggccaaatccaccgaatcgtctcttctaatctatccgacgattctccggcggatatcgcctcgagttcctcctcatctgatcaaattgtcgccaccgttacaagctttatctgctctggtaaaactgtctccttctacgatccgcttggccgagttgactcgcgtcgaatcgattccctccgagtcgactcaccggaccacctaattgggtggttctccgcccgcaggaaaaccgctaaccgtccatcaatgagagagttagccgtcacgtcgtctctctcgtctcaatttcacttaccaatcgaggatttgcaaaaccctagatcgatgaacatggcttcatccgtgttctttcttcttactatgccattgacggatcagtgcattcacacgcacgagtaccgtgcgtaccagttccgatcctcgaaacaacggctcgaacctagatccgttggtatagtcaacattggaccagcgtttcgaggccattacggttcgtttagtccgaaatcgggatttccaccgttgatctgcgagttgagtagctcagccatgagcgtggattgcgatgagagttccttgagtgcgaagaaacaatcagcgaaagatcagaaggagatcgatgcgttagcagaggggtttcaagttggagagttgaaacgtttggttggagctgaagctgcgaattacacaggcgggattgaagaaatgtatgagagaatgctggcgaagatcgagagcttggcttctgatgttgagaagagctcggctagggtatttcaacag

SEQ ID NO: 192887 - DNA, 562 bp, Arabidopsis thaliana landsberg
agggtagaggaagtctgcattcattcctcaaagccaagggttgggcaacctcactgtctgctggtgttggggatgatggaatcaaccgctcgtctctagcatatgtgttcggcatgtccatacatctcactgactctggtttagagaaggtatcttgtcacatacttatttatacttaatttcccctaagtaagttggacgcaggggataattaatcattttcaattgtagatataaccctttgtctctgaattttgaagtaatatatttacttgtttcttattttggttgataagctgatatagcctgttactagctgcatatacagtagtcttgttcttgccatatttgcttttgttatgttactatgtcccatgttgaccctatggcaacttttgttgccaaatttatatcatcagtggttgcatctatcaatatctcaagatagtgcgtgatgtgtcaccacaagaatggatattcaaggaactccaagatattgggatcatggtcttcagatttgttgaggaccagccggcagatgattatgctgatgagctctcag

SEQ ID NO: 192888 - DNA, 371 bp, Arabidopsis thaliana landsberg
atattttcctctacctcagacacgagcgcggagtcctcatcacttgtccacacctcagcgtggactattacgcacgaaatcttcttcttcaaaatcgctactatatctatagcaccgtatccgtatcctctcatcttcctcagaatcgcatctctgaactctcgagcgcatctccgtcgtatcacgccgagcagtcactgttcttactgcgatcacgatctttgcgagtcacttccttactggacttagaattctctaacatcatgtcaaacgcaacaaatcccgatacgaaactacgtaacagatacccatattcaaatcagattaatcaggcacacaagagctacaacgatatacctaaaaatgttgcg

SEQ ID NO: 192889 - DNA, 1498 bp, Arabidopsis thaliana landsberg
gtcccctggtggcaacaactagtgtaagtggatgtggatgtaagggatgtcgcttcatgcatggagcatttgcacaatgttcatggaggatgaagtcgcattccatgcatgaatagaactgaccttcatagatcggaagcgcacaccctcgacaatacgtattttcgtcataagctctaaagatctcaagttgcagatggtgactatgaaaagggtggagtattattccatcagctatcctcttgaacggctcaccatcatctatcttatcattttcttctggtactccttcgagttcttttccatcccacacctttggatctattgcacattttgaatgaacaaaataaccatcacatttattgcaagcatacgcaccataattgttgtcaacttgttctctgcagactccgcatgaaaaggttccagatagaagagaagaggtaaaagatatacggtggtggtggcgagatatcctgatgacatgcgggaaaccccgacaatctttatggattgcgaagacacattggatacaaatatatgtgggatcaaacttcttaatcgaggcacaaaaatgggaaactaaagaagcttgtgcagggtaaaaggtgagagggtgggaatggctttttgggtggtctacagcaaagggtattgacctcatcgcacagatcggatgcataatgagcttgcatgtagaacagtgataaaaaatgtcgttgaaataatggtgacaacaaatgcagttttgactctgtggagaactggtaagtcgaagagagtgaaaagggtgggaaggatgtatgatctcgaatggagactctacgcattctttgtggaacattttttcacatataaggcatgcataataggttgcactgagcgttggacgcccgcatgcaccacaccgaaaatcttctggatcaggttgttcagtgttgcaccaaaagagaaggactacaggaagcttacagatataagggttatcccaatcaaggaaagattcgccttcttgatcagtactggttcttttgctggggaagtgaggggaacaattgaatggataaaactcttgagtctcatgaccatcaatgtgattgcgcttatgaaaattgatacgtgaactaggttatgaaaaaagaggttgaagagggagtttatggccaccagaatccatggccagtgattcattggaggagtttgggttgtctgtttgtgttaatgtgtataccaaaaatggttttccatcaatttcctcctttcaaaatactcccacggaactcatggtttcgataatggggatttggaaattttttgtgatatctttcttctccttctccctcttgcatatatagccaatagccctggaacaaatatccgggatccgcgggtatccgtatctggaaccgggatccgatccgaaaaaccggatatccgtgtgaaacggttccggatacggatagtaatattttatatccgcggatacggatccggataa

SEQ ID NO: 192890 - DNA, 54 bp, Arabidopsis thaliana landsberg
atgatcgagattggtgcgaagaggcactaccgaaagaggagatcagagagacga

SEQ ID NO: 192891 - DNA, 627 bp, Arabidopsis thaliana landsberg
atgggagattgcgcttcttgtgtacgcctaaaggctcgcttcctgttagtcgaaagaaagcaagcaagccagtacttgtgttgcaggccgtacaaagcaagaggcttaatctctcctttgttgaaaccaacttcgtttaggtaaatctctaggattctgttccatttctaaaaaccgaattcgtttccaaagcaagaggcttttcaatctactcatctaactaacactcaagctactaaagaaacaccaaaatgcatttgatgaataaaacattctgtaggtaaagcatatctcaatgtataagcaatcaagaaaacaaaacatccatggatttaatcgaaatccacaagcaaaaacaataccaaaataaattcaagaaaccaaatctctagtttttttcgatttcttacaaaacgcacctcagtttcagattctcctaccctttcgagtagtaacactcttcatcgcacttacagcgacgttaagcggaagcggtggcttcctattctccttagccatactcctcaacgaatacctcggtatactactctcaaccatagacaccaccgtcttcttgatactctccttcttcgccgttcctcgtctcttaatcgtaacggttcatga

SEQ ID NO: 192892 - DNA, 515 bp, Arabidopsis thaliana landsberg
atgccctgctgggtcaccttggtagtgatcaatggagtcatgatctccgggcagaatgggaatcacggcttgtgggtaaagtgcacaacctctgcagagtgtttgaaaactgatatatcagccgtgctcgcggttatgagcagccttggatcctctttgattagaagaactttgattacttttatgatgatgattagcaatgatgattataattctgatctctggtatttcctcttggagggagtacttctgggtaataactgggtttattactaaaatttggctctacttataataataaaacttgactaactaaaagcaacagctaaaccttaactccacatacagctagtccactttagccaaatgggacatttgctgagtacgttgatgtgtactcacccttgctttacaaaccacccaccccaggttgtccccactgtactcagtgctcaggaggtgatgttggtaacatggaggactttgaggagttccaggactacgacgagttctag

SEQ ID NO: 192893 - DNA, 663 bp, Arabidopsis thaliana landsberg
gggaagttgatattccacagtaacataattgcagatgccatatttcgattgttagcgggacccaaaaaaacacgcgaaaatataataattgattacgtaaaaatgataaaaataggtaagcattatatagcgagattgattgtgacttttgctttacgcacaccgtcatcgtcttaggtacgttttagttaaaaaaaagtattgtgggtaagatccttaaatgcaatcataaacttgagaaagaagaagctccaaactatgttatatccacaattataggtccatcgtattatcatatgattaatacgaaccatttattcgcatttattccaatagaaaagacatttaaacactagttgtaatttggtacaaaatttctaagaacatcaatgtttcaagagcatcagactcttaagatgccgacattttgatatatagatatggattaaagtttgactcaatcaaacacgaaaggtatgagaattttacctcccaatccaaacaaaatcttcttatttgtggcttaccttgtgtatctcttaatttctcttctgttttcttatcttagacttctttttccaaagggaaaatcccaaaaaagaaaaagcaagcaagaaacttgcaaccaaagttcaatgacctaaacggtaccggcaaacttag

SEQ ID NO: 192894 - DNA, 153 bp, Arabidopsis thaliana landsberg
catccatcttcgatcaaacgacgtcttcttcggcatgggccacgcaacaacgaagattcattgatccacgtcaccaatacggtgtatcatcgtcttcctcttctgtcgccgtggggctcggtggtgaaaacagtcatgacctccaagcattag

SEQ ID NO: 192895 - DNA, 55 bp, Arabidopsis thaliana landsberg
atggatgccaggcttctcctacacagccaagagctcacaaccatcacggtgagag

SEQ ID NO: 192896 - DNA, 1215 bp, Arabidopsis thaliana landsberg
aaggaaaagccgtcctacaaccattggctaggctggaggttcacagctggcatgatgcgcccgagcctcacgttcttctcacggtgaaaatcgcagagctctactttgcaccagaagaaacagagaagcttctgcaagctgcacatgtgctggaaatagcgcgggctcaaaagacaaaacaaaccaaaaaggcgaagaaacccgaacctcatggttcaaccctttataccaagacatccctcggggacttgagggctcgtattggtttcagcgtgatagtcacccatcgacttcccacccgagagaaagagcaaacgatatccccgagggtttcttcacattgtgctaggggttctattttttcatttggtttctgatcccgaggcaaatacttgagtacgtgaccacgtacaagatcattctttcccaattgaccactcgcgccctgaggcacctcgttgggattttggtacgtagttacgagacagatacgggtgactggcgagtaagtttgcaaaacaagaccgagctaaacaatgaagtagcttgagagagtaaggctgcgaaactagtcaatcattcgttttgtccccgaggtgaccatcgatcttcattgtttggctcggtctcgttctcggggtggaaacaaatctttcacaaaacctaataaaagagatgtatgtttttttttcctttccatcgaccttaacccgaaaaaaacgccaagctaaagagtaaaccccaaactctatttttctttccgttgacctaaatctctcgcggtctcgccggtgattcctctaacgtatctaaatcgtcgccatcggcgattcctccaccgtctctatgttccgtcgtcgttcttcctcctagaagcttcatattggttcctttcactacttttagctatgatttatgtatagtttttagagttcttttgttttttgtagagtcttttctagtctttttcaggtctttacatgtttgggatgcatttggagattatggagcattgtggagcaaaacagacaacctaagctgcagaagcaatccggagacgaaatttgacgtaggtgtcgatcgacacaacccctggtgtcgagcgacaccaatacctaatgccaattcaattgcgcaacttattgatgttttgaagatttccaaattcggtccagaactttcttttatttctaaagaagtccctgcacgttttag

SEQ ID NO: 192897 - DNA, 361 bp, Arabidopsis thaliana landsberg
atggaaaccaaaatatacagcagcgtggcaaatccaaaaagcagcaaagcaaattctattgacttaacattcgagaaggtgaaccattgtcacgaggcaagtaaaagatgtatccagtatgagcttagaagttctcgctcagccaaaaacggagaacactggatcaagacagacgaagactgtaagtccaccatcatatgcaattcatagaattgtttgcataatcccttttaactcaaaggaagaatatgagtctaaattttttgataaaatggtatttaggcatgcacaagtattctgcttgtgacccaaccggctaataatccataattgatttgcagatttcgtgttggaactgtaa

SEQ ID NO: 192898 - DNA, 208 bp, Arabidopsis thaliana landsberg
atgccgttcataatgtgagttcacctattactcaaggagttcaagccctttgaccgatcagagcactccattgccgcgaagtccggaacagtatagggaattagagctaacaagagtgtcttccatctcgagcggtgaacttttcactacgcaatcagaacaagttgaagatgaggaatctgctataattcaatgtgaaggtgaatga

SEQ ID NO: 192899 - DNA, 778 bp, Arabidopsis thaliana landsberg
atcgtgcggattccacggtctcgatctaaattggaagtatccgagcattacgacggagatggacaatttcgggaagctacttcgagaatggcgattggcggtgaagcagaggctagaagcagcggtaaaccgcgtttgcttttgacggctgcggtattctactcctacagttattattcggtcttacacccagttaatgccgttgccgatagcttagattgggttaatcttgctgcctacgatttttatgaatcgggttcgtctagagtaacttgctcaccagctcctctctacgatcctataaccacaggtacaaaaaaataactgaactaagctaagataaagtaataaaacctatacatatataacgtgttgaatatgtatataggtccaagcggcgacgccggagtgagagcgtggactcaagctggacttccggcgaagaaagcagtcttgggacttccattctacggctacgcatggcttctcacagacgccaacaatcataactactacgcgaatagcagcggaccggcgatatcaccggacggtttaatcggatacgatcagataagaaggttcatagtggataacaaagcaacgatggtttataatttgacattggttcagagttactgttatgccaagaagatttggattggttacgatgataatgagagtattgttacgaaagtgaaatatgctaagcaaagaggtctacttggttatttctcgtggcacattggagctgacgataattctcgtctatctcgtgcag

SEQ ID NO: 192900 - DNA, 225 bp, Arabidopsis thaliana landsberg
gtaggccatagactaaaggttcattatgacatggagcaagagtcaatggatctagatacttgtgccagtgttgtgttagccagctttgcattctcccctaaagctcagatagatgtagctaagaggaaaagggttaacgtaaaatttagaaacagacgatgcagtgtccttgatttagggagacaagctcagttccactatgagtttttggaagaagcaggctaa

SEQ ID NO: 192901 - DNA, 375 bp, Arabidopsis thaliana landsberg
atgaaagtggatcgaacattttctgatctcaaatctattccggtggatcttgctacttgtttccgacaaatgatagagtggttggagattgcaaattcagaagatatattgaatccatacaataatttaagtcatatttatcagatttttgattcacaaggtgttcttaaatgtttatttaagagtagtgaaagagatgatataagttctatgatagaggcatttgtgtacctatcggaccatcccttagatgtaactagatttttttctccagccatttatggctttgctggagttttgcccatgatatttgtaagcttcagaaacattaaaaaagttatgcaatcaggtgttttggtggaattcgggggattc

SEQ ID NO: 192902 - DNA, 111 bp, Arabidopsis thaliana landsberg
gcgaacccggaatcggtgtgcgtgctgcgaaaaccgattccgggttccgcccgcaaacagcgcgggcggccccggaatgacgagataaagggatgcgacgctgttgattga

SEQ ID NO: 192903 - DNA, 214 bp, Arabidopsis thaliana landsberg
atgccgcggcgcttcagcgcgctggcgagacggcggcagtgggcataggtctcggcccaggtgtaacgctgcgtcccgtggaccacagcgagtcgatcgggatgcaccgcggcagcgcgctcgatgaaactgagcggcgtcaccggcatgtgattggccgggttgcgatcgagatcggctgtgtaagggttggtcatcccgttcctccgccttg

SEQ ID NO: 192904 - DNA, 155 bp, Arabidopsis thaliana landsberg
atgcatatttaccccagattgccaccgcgctttccagaagtgcacaacgataatgcagtactactcaatctcaacggtatcagtgcgcccaatcgtgagtgtgggtgcgtcaagcgtcttttggtgattacatgtcactatggagaattcattta

SEQ ID NO: 192905 - DNA, 812 bp, Arabidopsis thaliana landsberg
atgacaattgcaaagcgaatttctacgtcactggcgggtgacatgacaatttttccctcggtgacgcagaaattccaatcgctctatggaaaatctattttgtgtaaaaattttgatttagaaaaaaacgtacaaattcattactagtagttctatctagttcatcaatattcatgggaatgctccaagaatagattttgatgttgttgaatcttgaattcccaaaaagaaaaagctttttgaattgaaacaaagtctcagactttattgttgttctcattcaatgttggaatttaagccctcttgaaattggttcaccgtctgtgtgtaaagtcagtgatttcaaattactggttgtgcacttacttggttggtatatgatttcaaaggtagtaactttgaaagcatttgtgaggaagcaggacatgaagattttatttgttgaatgcggagaggaatttgttgagcttgttttctcttttcttgctgtccccccttgaatctgcatgggaaatctctggcagcagtatctccttaggttgcattagaaacttgtgtagtcaacttccacatgcgcacttccgtctttctataatttccagatacaactgtctggtattatcactcaacaacctccggtgtactaccgttacaggctctacgattacaggcaaatgaactatggtttgactacaaacggtaatcgaactacttattaccgcaaagacagaatcgttcgggtggatttgaaggatcccaaaatccgtggcagcgataagtctgctcaggggtttcttgaagaaagcgacaaa

SEQ ID NO: 192906 - DNA, 80 bp, Arabidopsis thaliana landsberg
cctttcggacgagccttccccgcatggcagtacaagcgggtgctgtcatgcttgtgcaaccgcagcttatgatcgccttg

SEQ ID NO: 192907 - DNA, 208 bp, Arabidopsis thaliana landsberg
atggtccaatacggtggcgaaatcgtaaattcgagtccttttggagcccatacttcaacacagatggaaagtgggcattttgcagaggaagggtttacaaaatcttcttatttcagaaacatccaagtagttgattgggataacaatttggtcccttctcctaatcttcgagtacttgcggatcatccgaattgttacgatattcaag

SEQ ID NO: 192908 - DNA, 627 bp, Arabidopsis thaliana landsberg
atgaaactgaaggccagcaatgcaatcttctacatgaatttcaaggcatatggaggtccacaatgcagaggaatagtaaggaaacaagtgattgaagactaggacatatgtgatcgatcggtagatagagagctgatggtttttgtgtctggataatactttttgcatgtaaaaaaccattgagacaagtcaatcttttacattgtaattgatttaacacaatatacttactacatcttaattagtattaatgagagttttagtactagatataagtcgaccaaattaaaggaagccaaatgttggcgttagaagcatattgtggtttaaaagaaacaataaaaaagaaacttgtgagtcaagtaaagaaaaacaaaaccccaatttcagatttatgtttggttccgatttaaaagggtctttttttttttctcttactttgaatttttaacaacattgacaaggttactctctctcccgtacgccactactttgaattgtgtttgttttggtactttgaatttgtccgtccgtatgaagaatattattctctcctttttatgcagggaaactgtggatccggtcgacaaggaaatgaggaaattggtctattctatttacggagag

SEQ ID NO: 192909 - DNA, 357 bp, Arabidopsis thaliana landsberg
attctatttaccaccttcatgattaaggtaagtgtggtctagcccctcaatatgttcgacgatgttcacttattggaattctaatcatctttgtattggtggagagaatataattaagttgtcagcaaatgaaatcaatttaaatggtttcttctaaggacaaaatgtcaagcgggtgtgatatggggataaccggataatcatcaataactccaacatattgactttagagaacgacaaaagtaggcaagaaaattattggattggccaacaatgagaagatgaaagccatgttgcggactcaaagctttaagacacgtctgaacatccaagagaatgactcaaacacctacggaa

SEQ ID NO: 192910 - DNA, 490 bp, Arabidopsis thaliana landsberg
  unsure (1)..(490): unsure at all n locations
atggggaccttcatcgaggaactctggtgggtgtggatgcctcgacaggcacgattgatgaacggaggtggccagaattccttaccgctcgtaaccgtccgccgtgggccgcttggttgcgtggtcggaattctctgcggcatgaaccctggtaagcaagcccctaccaagttctccgtgtccttgcctgcgtgtagcaccatgaattgtggggattagctcactaaaatctcgatggcgcttgactccggcgaatggaccaccgtgggggggggggctccgctgccgtggcttgtgtctgggggagaaggtgattgccggtggccgttcatcagatgatgggcgacccagattcaatctggtcagccagcacactcatgtctcatcgtgaccattgatcaattagtggacgactcagatcgaggcctcgtaaaccatttcgcttcagcgatgctggttccttggatccggatccggtggtccctggntg

SEQ ID NO: 192911 - DNA, 69 bp, Arabidopsis thaliana landsberg
ggttttgccaaaggaaagcaaaccgtgggaaaatgtgaagaagacgctgaacggtctcccaaacattaa

SEQ ID NO: 192912 - DNA, 2898 bp, Arabidopsis thaliana landsberg
aaactacgagtgcaggagcgacgagtgcgatgtaagagaatcttggtgtggagttgtgatcacagagtcgttgtttgcacttaatctttaacgcctctttcctgtctgctgaaccgcacaaaagcatatgaccaaaactacaaacgttagaacataagacaataaaattcacaagaacagttaagtacgtggatataaatcactcacaggaagtaaatccaaatctagccccttcacatcataactacttaaacagattcagagatatatcagaaataacggacaatatatcagaaaaaaagactagcagagagaatccatcgacatgatgctaataataaagatctgaacaaatccgaaaacaaatcgaatttaataacaaagaacaacaacaaacagatttgttaaagattcgtgtggttttgtgtatacctttgagctgattctgaagagacaagcttgtgaggtcatggcgggatgatctgatttaaaaatcgcgctagagctgccagtaatctgagagagaaagaggaatatggtaattgaattgagagttttatatgcaaaaagcagttgagatttcaaactatgagcacaaatcatgaatctgtgacaacttgatcaaatgcaaagttgatacttttgcttaccagcctttcatgaacttcttcgatgccaaacccttaatgaacaaacttaaagtttgcagaaaatagttaaagcataagatcacaatccaattccagatccaaagctactgttcatttcacatgaatcttgaaatgagaaaacgactaaccatcgtctttgttgccggaatcagcgaagcgaatcaaagttctcgatctctttcacgatcggccatcacaatcgccagctgctcgtctcccatcgccgaaaaactcaagtcggggaagaagaagaaagaaatatgtagtgtttcacgagtaacctaatcatctatttcacttctaataattttttcactataatttattttacttaatttcatgagagatgtattgtgatggagtacaaattaggtgttattaccagaacataactttttttaattacagtcatatttttaatactcagtgtgcctctactaaacgtaattatagggaatgccactgtcacgtcagaaattgatgacgtggattaaatgaactcagccgtaacgcgatacaacgggagtaatgactgagttacggtatgttgcggctgacttattacaaaaacatatgaactataacaaaacggcgaagtatgagtataactcagccagacgttacggctgagttgaaaaatgttgtctgagttatactataactcaagcaacggtatggctgagttaaggaatgttcggccgagttataagaagttatacgataacccagccaacaatatggctgagttatgagaaaatggctgacttatttcctcgacacggtcgagttatatttttggacggcttagttatggaaagatgtgacggctgagttatggtcgagtgatataaatcagccgtaaagagctggattacgatataactcagccttgttacggttgacttatgtgcaaaagattaattactataatatcatgcagttacggccgaattttaaaacgttactgctgagttagttgagttacgacattatacggctgacttaactttgttttttttccttttttaattactgtaatagtattcatgttgcgactgacttatagatttgcttgatggctgagttatcaaatgtttgtttggtggcttagttgccacctcatcaattcaaaacgacgtcggctgtaatattccatgtcatcattccatgttagcatcatcaaaggacaaaaaaaatagagtcaaattttttcaactcgtcttcttcacttgagtttttcacatcaccggaacttctaattcttcatcgttttcctcatttttcttcaatttctttcatctttctcccgatatggttgatctggtttcggtaattgttgtttccgggaattgggtatagaaacacaaatacatatttaacactgatgaaaaagggtgtaaacttgtgcagatagatgcgaaaacaacgcacgacaaacttgtgaagttggtgctcgatgataaagttagacgaaatgttgtatctcttattgtttcgcgacaaatttacatgtcacggctgagttatatgcttaagggaagacgaaaggttcagtcaatttacatgtcacgactgagttatacgttccaggaaagacgaaaggttcgatagaattacattacggttgagttatatgcttaagggagaacgaaacgttcaatcaatttacatgtcacggctgagttatatgttccagggaagacgaaaggttcggtaaaattacattacagatgagttatatgtttaagggaagacatctataaatttacatgtcacggctgagttatatgttcaagggcaaacgaaagatgagtgtaaattatatgttacggctgagttatatgcttcaggaaagacgaaaggttcggtaaattacatgtcacaactgagttatcattcagggaagacgaaaggttgtgtaaattatatgttacggctgagttacatcacgttacggctgagttacatcactttacggctgatttataatacaaatggaaaagcaacatttttctggggaagacaatatgaaatttattggccaaataacaacaatcaaattaagaaacgtaagaatatgtttgagggatacgtaggaggaagactaaaccgtatgaatcaaaacatagatagaagtagaacaatcactagtcaacaaagccgtatgaatcaaaacatagatagaagtagaaatatctccaaagagatcgatcgagaggaagactaa

SEQ ID NO: 192913 - DNA, 49 bp, Arabidopsis thaliana landsberg
atggatgcgcgacttgaaggctctgtcgatgactcctactctgttggtc

SEQ ID NO: 192914 - DNA, 61 bp, Arabidopsis thaliana landsberg
gtctatgatacgattgatgtatcaagaagtaatgacgcacgtgagagggaagctttcttga

SEQ ID NO: 192915 - DNA, 314 bp, Arabidopsis thaliana landsberg
caaacgcggcggccaagaacccaccgcgacggcgccatcgttgggcctccacggcggattatcaccggacaccccaaattcgaaccccgtacccactacttggatcccaaccgcgctacacgtagaggacacccaggagaatgcaacggtccccccataccttcatccatgccgcacagccacccagcgccaatgccaacgactccatctcggcgagattcggaatccgcgacaccggccacccctgacaacgtcgcgcaatcgcccaggaaggccctagggaagtccagcacccaacagcgaggctctgtacc

SEQ ID NO: 192916 - DNA, 271 bp, Arabidopsis thaliana landsberg
aaatgtttctgaagcatttggaacagagtatcatggggccgggactcccaaagaagccgcagttgttggagcaaagtctgtgaccttcgaaaggattggcatcggtgttttacggccaagtttggatctgtgtgtgtgtgtgtgtgtgtgtgtgtgacagaaagagacagagagagagaaaaagaatatctataacagcgtaaggttgtttatgatgaatatttcaagcagtttggatgattccttcaaaataattcgaaggaataattga

SEQ ID NO: 192917 - DNA, 219 bp, Arabidopsis thaliana landsberg
atgtttacaaaaaatgcggtcagtacagtggtgggcatcgaaggaatggcaggagccgcaggaagtgtattgttgcccattttggtaggctatattttggatcattacaaagcggtcaatcacctcatcgacggctacaacatcatttttattatttgcggcacttctttcctttttgcctggttgatgattcattggatcgtgccgaaaatggacaaa

SEQ ID NO: 192918 - DNA, 145 bp, Arabidopsis thaliana landsberg
atccttatgcgggattaggatgttttcaagcgttataagctttgttcaagccaaaaatgttcgaaagaaggagctaggaagagaccatttgatcattcgagagacctatggaaaatcacaagccgtcgtcgatattcaattatag

SEQ ID NO: 192919 - DNA, 487 bp, Arabidopsis thaliana landsberg
gcattgtgttcccctggctcaacagtttcaaggcatgtcaatggtgttcaagcaagtagagctgacatgataattgcagtgagtgctctactaatattatctctttttttttttctaataacaaattacgtttgtgtacagcccctttttgataactgttatcgttttgttatgttctgccttatcatatgacaggttcttatgaagcaagctggtcttagaattcaggaaaatgtaagtcagcaatgttactcaacatgtgaatcttgttcttctagtaacatagtggcgctgtaataactgatatgaagcgtattaaacttcaatcttcattatctatgtgaatggtcacttagtgtcctagtgattgcagtcctgttaataataataaaagtttgcttcaggggatttttctgaacgtcgctaacggaatggctctttctgagactgctggcgaccttgcaatagcagcagctatttgtagcag

SEQ ID NO: 192920 - DNA, 91 bp, Arabidopsis thaliana landsberg
atgaagcgtttgatcgatgatatcctgtctggtactatttcccgcgaccatgcgggagtgactcagagagttcctcgaacactgaggcaac

SEQ ID NO: 192921 - DNA, 117 bp, Arabidopsis thaliana landsberg
acactcggcaaagatctttttgcactcagcaaagcctttattgagtattacactcaacaacgaacactcggtaaaaaatttatcagcaaaccctttgtcgagtgtaaaaaacactag

SEQ ID NO: 192922 - DNA, 966 bp, Arabidopsis thaliana landsberg
atggagaacactaaagctttgtttgttccggttgcactcaaaggagtgaactaccttctgtgggcaagaaccacgaagacaaccttgtgcagccgaggactttgggctcacatcttaacgagtgaagcaccatccgaggcgaccataagagaaggcatggagatagttcctgtcggtgaagaaaaatggttccaagaggaccaatcagtcttagctctactccaaaactcgcttgaggcttaccttcttgaaacttactcatattgtgagaccgccaaggagctatgggaaactctcttcaatgtgtttggaaaccagtccaacttaagccgagtgtttgaagtaaagaaagccatcaacgatctttctcaaggagacatggagttcactcaacactttggaaagtttaggtcgctttgagccgaacttgagatgttgagacctaacactctagatccaaaggtcctaatcgaaaggagagaacaagataaagtgtttggtcttctccttactttgagctcgacctacaatgatctcatcaagcacctccttcgagctgacaagtcccaaatcttgaggaagtatgctctcaaatcaaaaaggaacaaggttcactcggattatttgggaacaaaggaaagctagcttcagtcaatctaagtgatctcgctacggctaaccgagggaactacaagtatgacaacaataaaaaggctctataatgtgaacattgcaagagaagcggtcacacaaaggagaaatgttggacacttcaccctcacctaagacccggaaggagagaaccaagagcaaatcaagtaaccggagagaactttggaactcaagagcaatccggaacatcaaaccaacacttgggaggtaatggggcagcaatggcagcttcctctgacctagtgaggcgttccgacctcgaagctctcattaaggctctaaaggagtccgccg

SEQ ID NO: 192923 - DNA, 702 bp, Arabidopsis thaliana landsberg
atgaatcaaggacgaggtttggctcttgagccgtctatgtttgttgatgatgaacggttagagcagcaactcgtgttttctgggaagagctatagtgatgctttggagaacaatcatcctgtaagaatgatggacttgaagatatatcctgaggtttccgctgtaccacgagctgactcccgtgagaagtttgatgtattggtgcatcttagagctgctgccatggttactggaaatgctaactctctcaacaatcagatatctaggtatcctcgagctccagttgatcttgtcacggtgcttgacatcagtgggagcatggctggaactaaactggctctactcaaacgagcaatgggttttgtgattcagaaccttggttcaaatgataggctctcggttattgctttctcttctactgctcgtcgtcttttccctttgactaagatgtctgatgctggtaggcagcgagcccttcaagctgtaaactcagtggttgcaaatggcgggaccaatatcgctgaaggtcttaggaaaggtgtcaaggtgatggaagatcgaagagataagaatcccgttgctagcattatccttttgtctgatggacgagacacctataccatgaaccaagctgatccaaactacaagttgttacttccattgtctatgcacggttgtgaaagcaagcggtttcagatcccg

SEQ ID NO: 192924 - DNA, 379 bp, Arabidopsis thaliana landsberg
atggatccgcgatacgttccaaaaccatttctacgaagctttgatcgcgatttcaaaaccttgatttcagattcaaggtggattcgccgctttgtgaatcgagctctgcgagcttacttttggaacatctcgtttgggttatggtgttcttgccagccgcgtattgattcgccttacttggatagagaaaactctctcccacggtttcatgccacttcggattcggctctggggtttgttagagatatggctatttcgatacgaatgcccctctggagattagctgagaccaatagttccagtgctcagatccttagttttcggcgttacattgtcgattttaagcgctccgaatctgtctatgaggagactagagcaa

SEQ ID NO: 192925 - DNA, 79 bp, Arabidopsis thaliana landsberg
atgggcacggtcgtggatggccggacggtcagggtatgtgcagatcgactgatttactacagatttgcggttgctcagg

SEQ ID NO: 192926 - DNA, 802 bp, Arabidopsis thaliana landsberg
atgacaggtaatggattacaaatttcaaacgagtaaagattttgatttatttattaatgagcaagagaataaaaattttattttatttaaatcaaataaatgattgtggatggaatacgaaaatttttaaattaaattattaattgaaccaattattggaacggtcaaaggttgttcggtggagggaaaacagtcgtgctaagcgttaattcaccggaactggtttgtagaaatggatgccaaaagatttcttgacaatagaaaaatgttatagctttgattcgtattttaaagaagataatgttttcgacatatgttagctatatatgaatcgaatgttccacatacgttacatattgcatgcatgaatgttcaaattttcttccaaagtaactattttatccttaatatatggtctttatcaattcttttaacaaatttcatgtttattaatgttcaaatcctcttttaaagtaatatatccatgagatatctgtgaaatttatcatatgtaaaatatttatatagttttcagaaatagatatatatcatataagctatataaattacaactaatggtaatattatatgtaatgttgtatgtaatgttaaaagcatgtttaagattgatacaaacgacaaatggatctggttcggttgcagtttcagagcttaacatatgcatgtacatacactttgattccgtgtaatcaatgacttgatccttttaaaccactttgttactatatccacacgacacacgttcttcctttttactctctctttagatgatttcctttag

SEQ ID NO: 192927 - DNA, 142 bp, Arabidopsis thaliana landsberg
acgacggcgatgctactctaacgctttcgcaattgggtattaaagaaaactctaagatcctctctagtcgtcaagctgctcctgaagaaggtaagtctatcatggctgaagaagaaagggctcgtcgtctctctcgtgtcaa

SEQ ID NO: 192928 - DNA, 155 bp, Arabidopsis thaliana landsberg
ttggcagtgttaagactgattcgtactatctagaaccagactttgcaactatacttttgcgatgtaatatagtattgttctttataatttaccgcgtgagacctttaaaggttatacgcgttcactcgcatccgaagctaattgatagcaaataa

SEQ ID NO: 192929 - DNA, 165 bp, Arabidopsis thaliana landsberg
atgtacgacatgaaatcgaaagaggatggttcagattggcgtagattgtcttcttttgtaacaacggaagaagaaacgattgaagaagatgatgaaacggtgcgttttgatcgaaaggagatgggtttagtaagagttataggacaagatctggatctggatttg

SEQ ID NO: 192930 - DNA, 327 bp, Arabidopsis thaliana landsberg
aaagacaacgaagaaaaaagaaaatttcgaaaaggagaaaaatatctttggaagatggcgggatctctaacagcatcaaaccgccgtagaaacgcggaggattcttcagaaatttaccggtggacgatcggttttgctcggtttgttcactatccatcttctccttctccgcatccagttctgaaacctctcggaaagagagagcagtatcattcgccccacggaacctggctgtcggcgtcttcttcgacggtttctctccacattgtcgacgaattgaaccgatccgatgtgattctatccgtcaaactcggccagaaagtcctt

SEQ ID NO: 192931 - DNA, 128 bp, Arabidopsis thaliana landsberg
ctctcgccaatgggggagacgaagcagggtggctcaaaaaggttcgggctttctctcaaatgtgttgtgggttgtgttcagaggaagacaaaattgacggatttgatttggtgacaaaagaaaagtaa

SEQ ID NO: 192932 - DNA, 63 bp, Arabidopsis thaliana landsberg
cagaagttcgcgaaagccatggtgaagatgggcggcgtcgagatcaaaaccgccgccaactga

SEQ ID NO: 192933 - DNA, 144 bp, Arabidopsis thaliana landsberg
atgtccatgctttacttcctaaacagcgctggcgcctataaccgaaggttattgactaatgtgagccaccctaaacctatctcacccggtatcccatagcttatatacgagactgacctggccattaacgacgacatcgtaaag

SEQ ID NO: 192934 - DNA, 426 bp, Arabidopsis thaliana landsberg
tgatgagtttttgtccggatcagataatggaagtattgcactttggtccattttgaaaaagaaaccagtgtttatcgttaacaatgctcaccacgtgatagctgatcatgattctgttaaccataactgtacaccagcatgttcttgggtcagttcagttgctgtctgtagaggtagcgagcttgctgcatcgggagctggtaatggttgtgtgcgtttatggggtgttgaaagtggatctagtgctatacaacctttatacgagcttccacttgtaagtttgttttcctaggtcggctcttattgctatttgtgtgttgcatctgttactgacatccaatgcttatgacctttttgcagcctgggtttgtgaactctttagcttttgcaaaatctggtcggtttctgatcgctggtgttggacag

SEQ ID NO: 192935 - DNA, 286 bp, Arabidopsis thaliana landsberg
tctgatgacactgtcagctcaccagtcaaggcagatggcagactaatttattatcggattggggacgaagatgggaacgtggatgaaacagcaaaggaagagcttttctgcttcaagggaatgggactagaagagctaaaagagaagcttatagaagagacaggtctgagtgatatatcaatctgttccaaaaaccctttaaacggaaaattatatccccttcggttacatcttcctcccaacaacacaaagatgcatgtcgtattgatcccttcgccttcaaaag

SEQ ID NO: 192936 - DNA, 265 bp, Arabidopsis thaliana landsberg
atggtggagtcacaacaaccggagttcttggtggaggagatgagtaatatccaccagaaggagggtgtgatggcgttgggtgcgaaggagtggaagggtgtgaaggcgtggaagggtgggaaggtggacttccacagttacaaggaggggtgtgtggagttggcgtgtgtgatggagtgtgtggagttggagtgtgtgatggagtggaaggagttggagtatgtgatggaggtgaagggtgagaaggagttgaaggagaagggtc

SEQ ID NO: 192937 - DNA, 324 bp, Arabidopsis thaliana landsberg
atgacctccttgacgtgcttccaacgcaatcactatgcacaaaatatgcttaaacgtcccaagacaggtgcagaaaatcaccaacttcccaccaaaattcgctatcttggaccaacattgactgacaataggcaaatgaaaacccatcacaggtctccaaaccgattcattcggataatataccactatcggatgtcccagagaacacgtaagatcaactgtatacaacaactctccaatcacagtaaacgacgacaacgggtgccaaaatctcgtcaactcacttgcaacaccccatgactgccataaaccttgtactggttt

SEQ ID NO: 192938 - DNA, 552 bp, Arabidopsis thaliana landsberg
gtttaggatgtggaaaacactctcttgtaaacaaacaacagttttatcggatcaaaatttcgtcagattctagtaatagtggttctctttatcataccaattaccaacagtacaacctcaagaagtagggtatagtggggaaccgaccccaccaagggacttatggaaaataagttatgtaaaaattaccataatttggaaacttggtgggcaagacagagcaattcatatatactagtattaatggaggtgatgtgaacattaccaatttctcaattagggtttttttctttctttcaaatctctttgattctcgctaaagaacatctttcttattcattcatgtctctgcttctcaaccagcactggaagctatgcttccggaaaccagtgttggcgagatcctctcctcttcactctaatggcctctctttttcctcgttgcaaactcctccttgtttcatcgtcgacgctgaaccttgtggagcgggtctcggaaaactcaagattgttagtgaagatgattttcgcctcacacagttggagaagaag

SEQ ID NO: 192939 - DNA, 389 bp, Arabidopsis thaliana landsberg
cttttacaggagcagaatggttgcaggtacttgcagcggcgcattgcgagagaaggccccagtggagcggcgttggtgttgagggaagtgttcccgcaccttgtccagttgatgatggacccgttcgccaactacatgtatcaaaagctcttggaacacgccgcacctgaccaacgtttacggatgcttgaagcggtgagaggctcgttgctggtcgcgtctctcaacttgcatggaacgcgctcggtgcagaagcacattgagatgggcggcaaggaccctcgccagcgcgatattattgctgccgaactggctccttacgtcaccaagctgtcgatggacacgaacggcaaccatgttgttcaacgaatgctccagcacttggacag

SEQ ID NO: 192940 - DNA, 344 bp, Arabidopsis thaliana landsberg
agctgacaagccaaagaagaaaaaggctgccaagcaaggggaggcacgccgatgacgaacgacgacctggtcgacctccggaggagatgccaggttccggcggaggtacatatgatcctcccaaggccaccgctgcatcctgagaacgtgccggtcgggtggtgctgcgcttatgccaatttcttcgagaaatgcggcctatttttcccaattccggcgtgaattctcgagatgctctactgtctcagcctcgcctttccccagatgtgtccgaacttcgtccgccatgtgttggcgttattcacctaggctcgggaagtaaacagagaattcagctgccatga

SEQ ID NO: 192941 - DNA, 488 bp, Arabidopsis thaliana landsberg
agattttcttcttaataaaacacaggtatcaacatgctatgggtaacagcaacgggaatatagatgagtactgggaggcaattgacaatacctttggcctgcaaggaggtttcatatgggactgggttgaccaggttcatatcttaaattttagtatactctgattcttcatacaatagttaagcccataaaattaaattgaacctcttaatctcttctcttatcaatgatctgaaagtttttattcttgtaacataaagataaagtaggtaagatcctatagtaatgagcgcagtagatatatatggtcagccaaatccatgcataaaattagtcttttgctatcatttaggggctattgaaactggggtcagatggcattaagcgttgggcatatggaggggactttggtgaccagcctaatgatttgaacttctgtctcaatgagcttatatggcctgaccgaactcctcatccagcactccatg

SEQ ID NO: 192942 - DNA, 258 bp, Arabidopsis thaliana landsberg
atgatatatacgtcatcttctgaagctgaaagagtttccacaaaaggtaaaagtacgagaaaggcttagccgcttaggcttagtacgtgtcctcggtataaagtgtctgttgcatttcttgggtctcacttaacaaaactttgaagcactacgtcattggacaaaaaatttctgacaccgttctttacaactaacagtggagatggagaagaagagtagcacggaaagtccggtgctaatgtgtgatccaggcaagag

SEQ ID NO: 192943 - DNA, 112 bp, Arabidopsis thaliana landsberg
ctttttgataactaatcacgcaacatcagaattcaataagccaatttggaatctgagaatcatccgaaccgaaaccgaaccggaaaaactttgtagtagtaatctgctatag

SEQ ID NO: 192944 - DNA, 183 bp, Arabidopsis thaliana landsberg
aaaattaaagtggtaacgatcagccttccgatctatccttgtcgttttgcgccacgtgagcaactgtctctttttggcctatctttttctttttgttttgctttttttcttctttgctttttagagtatttcatttttgagatcggcaaacataataatgataacaatttttcaaataaataa

SEQ ID NO: 192945 - DNA, 2075 bp, Arabidopsis thaliana landsberg
gtttgctggacagtttctatgcagctacagtacactgccactatatgcactagtcactcaggtaatttatcgagctttcgacttttggcagcttccgtaaactcctaggaggataacgaaatattgttttgattccagatgggaacgaactataaagcggctcttatacctcagagaataagagagacgattcgcggttggggtaaagcaacgagaaggaaaagaaggcacgggttatatggcgatgattcaacagttagaacagaaacaagcacaattgcatcacttgaagaatatgatcatcaagtgcttgacgttactgaaacttctttcgaacaacaacggaaacaacaagaacaaggtactactgagcttgagttgcaaccaatccaacctcgtaatgattgtgtacccaatgatacttcaagtagagtcggaacacctcttcttcgaccttggctctccatttcttcaccaacaacgaccatagagttgagatcagaacctatggaaacactctcgagatcgtcttccttgccaagtgagaagagagtctgaatataaataagttcgtaggagtaacagtagaaaacaagtatgtctcgatgaacatagattgaaaacttacatcaatcaagtgttagcaacactaatatttgtatgtgctctacaaaaaaattatattgcaatattgagaaacatttaaatttgttagaaccaaaaccaaatcttaccttttgtttaagctaagatttataaatcatcatggagataaaaagaggtataataagaaataaaacttttctacattggttaaaaatttggaaaaagaattactttaaattattttactcataattttgtttttccatttttctaaattaattaattaattatcttgacctttgtttgggttctctgtttccgacataacttttaagttttgtagctcctcctcgacggcttcgaaaccctaaaccccaaagtttaagctgccgtcaatggaggactccgatgctaaaacggaagctcctgctttcgtatacgatactcttcctccactttcattctcagattcgaatcaatctccaccaccaactcatgaagaatcacaccaatactctgttttccgcaaagagatttcagattttcccgacgacacaacgccggtggaatcagctacggtggatttcttctcactcgatgtagaaggtgagacgactgagaacggcgtcgaacctgtaacgccggtggttgtggcgtcgaagaagaagagtaagaagaggaagaaagatgaagaacctagattggagagtaattggtttagtgagaatagtttctctaagattccaatgcttcaattgcataaaggtaattagctcaaaaatcattcaaagttttagtctttaagctagtttttgatacatgtggctattaagtttaggttcttcattcaaagtttgagtctttgctaattctggatgaatgtgggtattgaatttaggttctttgttagtttgattatatatgagaattccttttggtgttgcatcctcataagaaacttgttgaggagatttgatcttggttattgcagaaatagtagatttctgtgattttctgttaccaacacaagccgagaaagctgagcgtgatgcagcagtggagagtgtttcaagtgttattaagtatatctggccgagttgcaaggtacaaacgttggagacttcagtatctctctctgagtattgttcaattttgggaaactgcaatctctaattcttgcttattctctgttgaaaggttgaggtttttgggtcatacaagacagggctttatcttccaacaagtgatatagatgtaagaataccttagagcttaacacaaacgattatctccacatccatttgagagacatctaatttagtgtttggagagatttttcatgtcttaatctctttttttttttgtttatgaaggtggtcattctggaatcaggtctcactaatcctcagttaggtctacgcgcactctccagggcattatcacaaaggggaattgcgaagaatcttctg

SEQ ID NO: 192946 - DNA, 209 bp, Arabidopsis thaliana landsberg
ggttcacaaacgctctgcggacttgctgcgggaaccagaccgtgccgtgtggcaggcccgggtgctccgtctgcaaggacccgtccacgtacgggtcctgggacgggacgcacccgacggaggcggtgtacaaggtgatcgccgacggggtgctgcacgggccgcacgcgtcccctgttcctctcgccgacacctgtcctccgacatga

SEQ ID NO: 192947 - DNA, 198 bp, Arabidopsis thaliana landsberg
atggggatagcagcagtagggaacaaccttataacttatgtaataaacgaaatgcatttccctttgtctaaagcggccaatattgttaccaactttgtcggtaccatctttatctttgcccttctcggcggctatctctcggacgcgtttctaggcagcttctggaccattatcatattcggcttcgtcgagctttct

SEQ ID NO: 192948 - DNA, 206 bp, Arabidopsis thaliana landsberg
atgccgagcgtgtcccctgcgccggtgtcatggcagagcagctttggcgccgctatcgcaggacgctttgtagcaagtgttctgattgcccgccacctgctggctgcagtgctgcccggcaggccgcctttctttcgttcgttctcacacagagatgggggccggcaccgggcggcgtcgttagatggtagaattatgaagaggag

SEQ ID NO: 192949 - DNA, 339 bp, Arabidopsis thaliana landsberg
atgggtggatttgttccacgtcagcagaatttggtggtggataagcgttacggagattgcaaagacatggcttccctgatctattccctggtgaaagcagctaacattcccagctatttaacgtgggtcggatcacgtgatattccgtttaaatacagtgaatttccaagtggaatgtgtgacaatcacatgatcaccacttacaaggaggacggaaaatactacttcctggatgccaccaattcctttcagaccatgaatgcggcaaccgatttcctcgcgggaaaagaagcacttctgcacatcagtaaaacagaattcgaattgaccagcataccg

SEQ ID NO: 192950 - DNA, 213 bp, Arabidopsis thaliana landsberg
atggttcttaaaccagaccgccttatgccaggggatggtgtgagattgcggatgcagagcagaccaagttcttggagcggagaatctgtttgatggtgcatgaaggtccgttttccaaagaaaggagtcgtcatgctgacagtcaagcaaaccctgagcctccgggagaagatttttaagctgaacaatgattggattcctgctacggcttga

SEQ ID NO: 192951 - DNA, 206 bp, Arabidopsis thaliana landsberg
atgcttgttttgcctgcgacgcgttcgttatatcggataactcagttacctaccactactgtaacggacactctgattcatctagagggtcttcttctcagggacaaatattggtttagatcggtacaagaaaaattctacatgattctaaacccggttgagtacattggattcgataatccgatgcgtatactacacgttaaaaa

SEQ ID NO: 192952 - DNA, 249 bp, Arabidopsis thaliana landsberg
atgccacctcccccagctcccatcgaagaggaaagacagcctttatacgtgagaggcggctgcgtcaaatcctcccgttagtgctggcccttccggtggcgaactggtttgaagtttggatccgtattgagcttatgacaggttacctccggggcgattcctgtcatatccttcgtagaccaagcaaaagatgacgacctcgatttcagaaaggagatgatcagagacggaattggaaaccagaggtga

SEQ ID NO: 192953 - DNA, 87 bp, Arabidopsis thaliana landsberg
gtatctcttaagcattcaggctctctctttatgtacgccggtcacaaggggggagcatatgcaaagaacagttttggtaatatgtaa

SEQ ID NO: 192954 - DNA, 420 bp, Arabidopsis thaliana landsberg
ccaacttggaacagtcaaacttggtgggaagtggtgcaagcttctcaacgacacagctgaagaatgatctttctgaggcaatttctcaatatttgaaaagtggaagctatcgaatagagtttctcgacaacaggcagttaagtctttggatctccacaacatgcttgcaactaaaaggtaagttcaaagtgttgagtatcttctttggctatatacaacgtgcttccaattgaagggtaagtaatcaaaagtgttaaaagtatatctctcagtgcgaatctcttgcctatatatgttcttgtttattggtcctagtccctctttgaagtgataaaagttggttttggtctagagagcatgtaccttcaggtccttgtgcacaaggttcagggattattagaaaagtcacaagagtacgag

SEQ ID NO: 192955 - DNA, 105 bp, Arabidopsis thaliana landsberg
gactacggacggtccggccctaaggcacggacggtccgcagtgcaaaaagaacacagagacaacacaaatggtcaaacctcggaccctctggagaaacccgacag

SEQ ID NO: 192956 - DNA, 84 bp, Arabidopsis thaliana landsberg
atggctctagcgtttagccgcagcagcggccagcacgtgcacgccggcgaggatagcgcggtcccggcggttaccaccacacag

SEQ ID NO: 192957 - DNA, 198 bp, Arabidopsis thaliana landsberg
caatttgtcgtcgatgatagtcaaatcaccggagcgtcccaaacggcttgtcggcggcagcggttccggtacagtaaggatgggctgcagacccggccggcgcgcgccaaggcaggcatcgcatcgaacgtggccttccagtccgtggcaggcggagtttcaacttcgccgatcatcgttgcggctgcaggccgctga

SEQ ID NO: 192958 - DNA, 81 bp, Arabidopsis thaliana landsberg
atgcgcttcttagttcttattggacaacttgtggttctgtttcccatcatcacatgccaaatagatttgataagaagttgg

SEQ ID NO: 192959 - DNA, 60 bp, Arabidopsis thaliana landsberg
atctatgtagccgctttctccatcggaatgggacctgttccttggatgataatatctgag

SEQ ID NO: 192960 - DNA, 353 bp, Arabidopsis thaliana landsberg
atgaagctagcgattacttcccggagcggttctactttgacctatatgtcgcggctaggtaatcaaggtgcgagagggcagctcaccaaagggtcggaatgcttcaagggttggcaaacttccaagggaaggtttttaaaggcctctcgaagaaagtggaatctcttacgcacgcggtgaaggaaatgggacttcaaatcaaagatctacaaaggaagcacaagtctcctcctccttcaagtgaaagagatcgagttctccgtcggagtgattctacgagcatggcggatagatttgagcaaagtgagaacccggttgatcctagccgagcaccatcatttgagcctagctaa

SEQ ID NO: 192961 - DNA, 235 bp, Arabidopsis thaliana landsberg
cccgatcatctacgtggcgggcgtgttgtcccgggcgatcacaggcagttcggccagctcgtcgtgctcgtcgacgccgacggccggcaccgcgggaatcctcggtcgtctccgatacccgggggctaacgcagcggccgacacggtcatccaacttaaacgacgccccatggtgcgcaggcatgcgctctgacgtcgaggagcgtcggggccgatgttccgatcggcgaaactg

SEQ ID NO: 192962 - DNA, 69 bp, Arabidopsis thaliana landsberg
atttttttatgggtctttggttatacgccagcgtatattagcgtcatgggacagaccatgattagtaac

SEQ ID NO: 192963 - DNA, 723 bp, Arabidopsis thaliana landsberg
ctgggaggaggagctcttccgcgacgaaggttttgctccgtttgagttcggaaaccgtaaaaagaagaggccttggtggcttgatgatgatgatgacgatgacgacaacgatgattggatgaatgaagaagaagaagactggtctatggtttttgaggtattacttcttctttttggaatttaagaactgtaatgttgaatctcactttaaagttgctcactttagattcacaatggtttatgtttagttgttagctctgtttagccaattttagaggttttgttttaattgcaggtatttagaacattgagttggatgcttgcaccaattggcatatctttgcttcttggaacagattcaaacgcgggtgtaatggcattagcagttcctttagtgcaatctgtgttgtctcttgtggttagtaaagtttggagcaggccaagcattaggtctatgaaaagaagtagaagagatacattttcgagatctgcgagtgtaagtagtggaagaacaaggaaagctaggcaaggaggaaacatgaggggtggtgtagataagggaggatacaagtcatggatagtaggagatgatgattctaacagcatgggtactggatatggaggatgggatgatctagatacgctaagggagattagaaatgacaatctattaaacgagaatgttcgtccaaaacaacagtttgaaagaaaggctactcggcg

SEQ ID NO: 192964 - DNA, 124 bp, Arabidopsis thaliana landsberg
aggattgctactacaccagttcagaacaggcagcaaacaccaggttctagcaagggatattctattgccaaggttaatcaagtcagcgttgatgctactccggatggaggggacctcgtaattg

SEQ ID NO: 192965 - DNA, 276 bp, Arabidopsis thaliana landsberg
atgatgaaagatccgactgggtatagatttagtccgacgggagaggaagtgataaaccattacctaaagaacaaaattctgggtaagacttggctcgttgatgaagccattagcgagatcaacatcttgaatcacaaacccagcaaggatttgcctagtaatctctctctctctctctgggactctttctctctcgctgtctcgatctatgtgtgtctctctctctttctctctctcactctctttctcaccctcttttttttttttttagattaa

SEQ ID NO: 192966 - DNA, 73 bp, Arabidopsis thaliana landsberg
gtgggttactacgggctacaacaattacgataaaggggagacaaataattcaaaaacgtatttcaaacgttaa

SEQ ID NO: 192967 - DNA, 426 bp, Arabidopsis thaliana landsberg
atggacctcggctacagccgtgaaccacctcagaaggaaacgtggtggttcggagccggggatgggaataagaaaacatgtcaatggaaggtcaaactcagaggccatagactgaagccacacgtcgtctctctcatgatcctcttcaagagaaaacacactgcagcttggttccccttgaaggctgactcagtgaatgcatcaacctgtgtttagcaatactcgttcataaagaataagaagatcacattatcagagcaaaaacaaagaaaagaatatacaattaccacgaagtacttgacaggaaaattcctatccattgacgtttttggttctgtttttgccattgatgttttcgttagaccaaagctaaacttttataccattttggaggcttttaatttacaatgccacttcatcttttaa

SEQ ID NO: 192968 - DNA, 272 bp, Arabidopsis thaliana landsberg
ctgagctatcggtattggagcaggcccaagtcctttctcatagatcctgtcaccccagaagaactgatccccaaagaatggcacgatcgttgttggacactgatgacacaaatggaattcataagaatataggaagtaacaggtttcatgtggtcaataaaactgttaaagattccaacacaggacacttcggtgatgagtatgaaagaaagcaacttaaatgttataccccagcttttagtccagtcgctgtggttccagcaccgccatga

SEQ ID NO: 192969 - DNA, 531 bp, Arabidopsis thaliana landsberg
  unsure (1)..(531): unsure at all n locations
acgccaacgttcatggagagcggcggtctcacgagcatcgcgcaaggcatgaatcccgtcgtcaacgtcggcggcggtgccgactgtctctacgggcaagggtcgatcacgagcatcaccgtcggcgatgccgatgtcctcaccggaccgagcgcgggcggcatcatggtgtcggcggtgctcaccaacgtgcacgtcggcatgcatctgcaatggtcggtgtcgtgtctcgacggcgagcgcgatgtcgagatgacggccgaccgcgtgagtgtgcagggcctactcaccgttggcgtcgtcgacaagaagctcgacatccacttcgtgaatcccaacnnnnnnnnnnnnnnnnnnnnnnnncacctgacggccgtgcccgacacgatcgtgcagagcctcgacctcgataccgcggttagcacggtgatcggctcggtgacgggacgactcgtcgttcccatcgcgaatcagttgttggcgccactcgacgacactcgcacggtcgaagtcgcgggcaatgccgtcgac

SEQ ID NO: 192970 - DNA, 213 bp, Arabidopsis thaliana landsberg
aaattgggcttaataaaagtgaaagtatattacattttagggagccataatttgatttacaaaacacgatcgcggtacgaattgtcccacactaataatggccaagttcggcgactgaaaattaaacgtcaacaacagcaaaagaaacggagaagaaatagtaagggtgtcgctgcgaccacttttacaggggatgggcaagactcttcgtaa

SEQ ID NO: 192971 - DNA, 437 bp, Arabidopsis thaliana landsberg
atgaagtccactgaccagtttgatattggtgccgggcatataatccctttgaaatccatggacccaggtctggtttacaataccagaaccgacgactatgtgctcttcatgtgcaacattggctacacggaccaagaaattaagtccatggttctccacccagagccttcgacaacatgtcttccgtctcactcgtaccgaacaaatgcagatttcaactatccgtctattaccataccgagcttgagattaaccaggacaataaaacgtactgtaagcaacgtcggtccaaacaaaaacacagtttatttcgtggacatcattagacccgtgggagtggaagttttgatctggccgcggattctggtgttctcgaagtgccaacaagaacactcatattatgttacattcaagcccactgagattttctctggtcg

SEQ ID NO: 192972 - DNA, 317 bp, Arabidopsis thaliana landsberg
ataatcaactgggattcttccattgcaaaaccttcccgttggttgatgcgtatcgaaatcgcgaccgtagggaagccgatctgctctcgctaaggttccaagaaagttattggttccgctatcgactgaggaatctccgaaaacgaacaacgccggtacaaatggcaaagacggcttcaccgtcggagattgtgctctgcgcgacggcgatggaggtaaaaacggcggaatcgaaagctgaaacggagaaatcgaaggataaatcggcgagattcttgcagttaagtgatgatctgcgatcaatttcggcctcgtga

SEQ ID NO: 192973 - DNA, 176 bp, Arabidopsis thaliana landsberg
atggatcaacctctcgtcatgtgttatcgagtgtgcctctgccgtgctgctgcagaccccgagtgccgcgagacgacctcggccgcgctgctcgtgcccggcaacgccaactacttccccactggccgccgcggttgtaccaccagccgactgctagtgcatcttgatgctatatt

SEQ ID NO: 192974 - DNA, 117 bp, Arabidopsis thaliana landsberg
atgttcgaagaaatacttcataaatctgaaggaaaacaaatagttatgtttcttgattatgatggtactctctctcccattgttgatgatcctgatcgagctttcatgtccaagaag

SEQ ID NO: 192975 - DNA, 57 bp, Arabidopsis thaliana landsberg
atgatcgctcttaaatataggcataagcgtgattactacgtcaccgaatgtgtctcg

SEQ ID NO: 192976 - DNA, 129 bp, Arabidopsis thaliana landsberg
gttaactacaacaagtcaaatatgttccctattaacgtgtctccggataaaatggtgatcttatcccgtaccttcaattgtaagattggcgagatgccattcacctatcttggcttgcctttgggcctg

SEQ ID NO: 192977 - DNA, 663 bp, Arabidopsis thaliana landsberg
atttggccggctttgatgacggtggtggaaccttatccttctttggcgcctgtaaccatgacaacgaaagtaacgattcagacaagagaaagaagaaaatgaatacaggtgattagttagagaaaaggatgatagaaaacgataccatattgatttcgacggcgagggaaaagcgaacggcgaatagtagtgggtgaaagatgaggctgagggagatagcgctgctagggtttgctcttatattagggtttccctaagtttgaggtcaatatctatacgggcctctttcaaaaacaaagcccatgtttattaagttgggcattacgttggtttttcttttgaatttctgacttctttctctacaatagtaatattacaattgaaatttcccatatcacattttcattttttagtaaaaggttaaatagtactattttttttttttgacagaaatataaagattacaagaaacacagattaaagcaatctacacaaaataaatataatattacaacttaaattgatttggtttgcttctaggcgttcaagactaagttacgaggtgaaacaccgattcggattctgcgaagctcagaaatttgtgtggttgccacaactggaattctgatcctagttgccatgagcatatcatatcacatttaa

SEQ ID NO: 192978 - DNA, 427 bp, Arabidopsis thaliana landsberg
atgatcaaaagacgacgaaggtcgagatacaacggagtgatcggatttagcggcgaaggggaagaagtcggagtcgtcgtaggaatctttagtcgttccggcggaggaagagagacactcgtaacgccgtcgggtccggttttttctcatagccttaaacgccattggaatcaaaccatccattgattctttttctttttttggttgctccttttttttctgtggttatgttttatgtgtgttatcgttgaagaaagaagaaaaatagtaaaaccaaaaacaagagaagaagaagaagaaaggttattatgtgttgtgtggggaagttgggaggtttatggttttggtagtggtttggtaattactcaatacataccttccatttatttcatttgtctatctttctttagaaagaaagggttgttga

SEQ ID NO: 192979 - DNA, 953 bp, Arabidopsis thaliana landsberg
agagatctattcgtcggcgaagaagaggtttgtcggagagatctattcgtcgacgaagaagaggtttgtcggagagatctattcgtcggcgaatttgaggtttgtcggagagaacaattcgtcggcaaatttgagttttatcggagagaacaattcgtcggcgaatttgagtaggtttgtcaaaatgaaagtgaaaccctaattatttagtaaagggatagaccgttattttccacattaaaaggggcaattttcaaaatggctatcatgaaagggcattgttgcaaaggttattagaaaaaggcacttttgcaaatctcctttttgattgttatatcttagatttcacttgtacaatatcatctcgtatttatatcgacccaaatcattctaaccatataaccccgtcctatgaaattaaacatcattttgtcttagttttctaaactttaaatatttataataatagaactaacgaatgttacaataaatgataaccaaaacatagaacaaatagtaaggaaatttataacgtgttcacctaacccgcgaagactcgcaactctgttgcaaaaattgctacagaataagttatcgtcgcaagtgcgttgcaatttacgggggaactcagtttcccgcaaagccctcgcaaatttgcgacgtttttgcggggaatcatgacttccatgcagtttcctcgcaattgtctcgcaaatttgcgagggaaatatttgtcgcaaagtttgcgacgcaataacgagttggtcctgttccctcggagagatctattcgtcggcgaagaaaaggtttgtcggagagatctattcgtcggtgaagaagaggtttgttagagagatctattcgtcaacgaatttgaggtttgtcggagagaacaattcgttggcgaatttgagttttattagagaaaaagattcgccggcgaaaacgaagag

SEQ ID NO: 192980 - DNA, 41 bp, Arabidopsis thaliana landsberg
atggtttttggtccaaatgaatctctgacacaagaggcatg

SEQ ID NO: 192981 - DNA, 318 bp, Arabidopsis thaliana landsberg
atggacgaaaccgcgcgccggcgccatctgcagatggagtacaacacggcccacggaatcaccccgcagacgatccgtaaaaaaatccgtgagggcatcggcgacatgttcgacggctcgctcagcgcctacaagctgcagggaaccaaagaccgcaccgccgagcaactgaagaagttttccgagaaacccaataaaatccaggacgagattctgaagctcagaaacaaaatgaaaaaactctcggccgagctgcagtttgaagaggcggcgtccgtgcgcgatgaaatcaaacggatggaaattctggaactgcag

SEQ ID NO: 192982 - DNA, 317 bp, Arabidopsis thaliana landsberg
atggccggcctggcgctcctgtgccgggatcgggctgaagatcgcgctgctggacctgtcggacgtcggcaccggcggacgggtcgtcgcctgggccgcgctcggcgcgctgctgctggtgggcgccggactctacgcacggctgaggccggagggcgagggccgcagggcgaggccgcccgagacgaggggcgacctccgcgcgtcgcgctcggcggtcgagcgggtctgaggtctccagcggcgggcccaggggtacggtccctcgccggccacgcggtgtccatggacggcaaaggatcggagcgggcccgggg

SEQ ID NO: 192983 - DNA, 213 bp, Arabidopsis thaliana landsberg
atgaaggtagggtctagtattaattggttggtatattaaaagagatcatgcagtaaagtctttcggacttctgaggaacaatatcgaaaaattaagtttagaggttttttttgcaaagttgattttatcggaaatgaaaaagaaagttggaaacgtagaacgaagaagattaagaaaaagcttaccgagaataaacgtatcactatcacatag

SEQ ID NO: 192984 - DNA, 209 bp, Arabidopsis thaliana landsberg
  unsure (1)..(209): unsure at all n locations
atggagcactggcgcgagtgcagctgtccgcgtcgctcgcggacagatgacggcgaaggagggcggagcaggtgccgcgacggcgcangcgcgagcgcagcagttcgcagacagatgacgacgcatgagtccgcgtccgcgacgacgcaggaggaggcgcgcgtccgcgacggcgcaggagggcgaagcagatgagggccgcgacgacg

SEQ ID NO: 192985 - DNA, 184 bp, Arabidopsis thaliana landsberg
gtttacatgatcagatcagcagacaaaagattaaccaaaaaatgaacgtcggtggattacagattgagaaacaaaaatatgttcaacaaagtcgtgttgtatttgacagcttaaaccacttgccagatgtggttaatgataagagcgatgtatatttgatggggccaatccgggattttataca

SEQ ID NO: 192986 - DNA, 423 bp, Arabidopsis thaliana landsberg
  unsure (1)..(423): unsure at all n locations
caggatattggcgaacggcgtgccttcattcattgggatggtgtcaacatcgaagccgagcgctgtcagcgcggcttgccaatccttcaacgggcggcaatacaggcggctgttgcggtggccgcgtgcaaacgtcaccacgtggtcgaccagcacgctgaacttgaacggccagccgccgtcggcgtcgccgacgcgcagaatcagcgtgccggatggcgccagcgcatcgcgcaccnnnnnnnnnnnnnnnnnnnncgcagcaatcggcacgtaatgcaagacatccaggatcaccacgcaatcggcttggccgaagtcggcagtgcacatgtcgccgacagtaaacctggcggcgtcgcccagcgcctgcttcgcgcgctcgacatcgcgcggcatcagctcgatgccgtgcaccgatga

SEQ ID NO: 192987 - DNA, 292 bp, Arabidopsis thaliana landsberg
aaactgcctaagactaagctgaagaagaagaaagaaagaaacagagaagacataaaaatgagaggagacaaggaagaagagaaggcgaagcttgcacttgtgttagctgcaaagtcaagatcgttgttgtacacttcatcgcctgcgagtccacgtgtgtttgcttctccgattcacactcttgcctctgttccgttttgttgggaagaccaaccaggcaagcccaagcaccctcttcgtcctctttcttaccccaagtgtcttgatttgccacctcgtttgctccttcctg

SEQ ID NO: 192988 - DNA, 113 bp, Arabidopsis thaliana landsberg
tttgcttgggacgaggagcagctcgaggagcagctcgaggggtgaggatcagttttcagggcaaggtctactatgacagcggagacgttgcagacattgcgccacagatgtag

SEQ ID NO: 192989 - DNA, 80 bp, Arabidopsis thaliana landsberg
acaaaatgccctcagatatgatctcggtcaatgacaatgtgtttgtggttgatgtgtcttggagagtttgtaatatgtga

SEQ ID NO: 192990 - DNA, 255 bp, Arabidopsis thaliana landsberg
  unsure (1)..(255): unsure at all n locations
atggtggtgagaaggttgtgctgngggtggacggagcagccgctgagaacgcaacgggcgcggaaggtggggtcgttgccgaagcgcgaggggaggaggagccacgggagcgggggcggggcctggcccccgaggcgggcgaccttgtctctccacgccctgcagacgagggagatgctggcgcggtcgaccttgcacgggacgcggacgagtatcaaatccatgaggtcgtcgtggagctcgtccgccatactg

SEQ ID NO: 192991 - DNA, 486 bp, Arabidopsis thaliana landsberg
cggttgaagaattcaaaaaagcccaggaacatttacgtgatatgggtgaggagctcgagaaagatgccttaaaaaaagaggctgaaaacattgatatcatccttggcgtgcataagtcagccatggatgaaggcgctgtaagccgtgaggattacgacaaagctatcaaggcggtaattgccgcatctatgaataattaccgaagcggtatgttggtaaatgagttcaggattatacctaaccacatgagtgctatagccgcttatatggtcgattatgcatcatttgcactcggaggccaggttcagctaccggagcaggtagagcttttcaaactaggcggaaccgtagcagaccagcaaaaagccattttatcgctgatggctgagcccttggctgctaagttaaagcagaaaggtgttttactaaagcagaactatactatcagtgatggtggtcaggcgttataccatccggagatataca

SEQ ID NO: 192992 - DNA, 740 bp, Arabidopsis thaliana landsberg
gtcaagacgaggtggcacactactactcagacccggacggaccactttgtatggcaccaattgatactccaagggtgagcagggttgacaatcatttaaggggggacatcatagcgactccagagcaagtgatggcgttaaataaacatgttagccggagaatggcaaacatctatttgaaagaaacaccagtaccgacagtgttgtatgacagagacgcaccgccgtattttgacgatccaagggaagaaggtaaaataatgtagaagctaactaataatgtagaagctaaacatcatgttagcgtgatatttgcattgtatatgttgatatgtcattgttaacaattgttagcttctaatattgggcatcggatgtcgcatgtaactaataagttatctgattgtgtgataacactgcagattatctgcattgagcgctaaaggacgccgactacgaaggcgacaacatctttattggtggattgttaaaaaataaggaagactgtgcgacgaaacttgccatacatgcaattaggcgaaagttccacttcatctacgccaagtcctgccataatactgtccttgcggtgtgtgtgagccacatatgcccatggcgtgtctacgcaacaaagctggaggatagtgagcgttttgagatcaaatacgcaacacaacagcacacatgcagtgttgacgcaagaggagacttcaacaaacaggcttctacagctgtgattg

SEQ ID NO: 192993 - DNA, 120 bp, Arabidopsis thaliana landsberg
tctccttcaatgtcgatccagacgaagacgatgatgaagacatagccttaacagaagaacaacggagtggcggccacgacgcgattccgataactgtcggctttagacatctcctgaaag

SEQ ID NO: 192994 - DNA, 202 bp, Arabidopsis thaliana landsberg
atgacgacgcccagcgagatgacgatcattgccctcgacggccatggcggccccgaggtgctcaagccccgaacagctcccgtgccccgaccgggggagggcgaggttttgatcgcggtgcgggcggcgggcgtcaaccggccggacgtcctccagcgcatgggcgcctatcccgcgccgaagggcgcgccggactggccgg

SEQ ID NO: 192995 - DNA, 778 bp, Arabidopsis thaliana landsberg
atggctatagacgtttgttgttcagaggcttctggttctggaatcagtccaagaatctcattctcctacgatctagactcaacggacgacggtgaagtcagattagactcaacacttctagattcaggttcggagttcgatttttgttttggctcaagttgttctgttcaagaagtgtctccggctgatgaactcttctccgaaggcaagattcttcccgtacagatcaagaaagaagaatctttaccccagacagtaacatttcgggttccaagatcagcttctctctcatcatcatcatcttcttcctcttcctcttcttcctcatcgagagcaccagaaaagaagatgagacttaaagagcttctattgaatcctgaatctgatttcgaagacaagccaagaggattgttcttacagttcaagagaagcataagtcttaactacgacaaaagccgaaacagcaaagggctgatcagatcgtttcatttcctctcacgaagcaactctactccaaaccctaaccttgacttgcttcccaaggaaacccatcaccctcacaagactcacaatctacctaaacacaagcctcctttaagaagatcatcttcgctctcttcttcatcagttcctttttactcgaagaagccactcggaagaaacagttttggaaacggaaacggtggaattcgagtcagtccggtcctgaatttcccaccgccggcctttatctcaaacgttgccgacggatttttcagcattggatctctctgtaatg

SEQ ID NO: 192996 - DNA, 164 bp, Arabidopsis thaliana landsberg
cttccctttttcgacccttcactttatttcgacggaagtgttacgactggagtctagtggtacgacttggagtgaattttgactgcttgaacacatactcccatttcgactactttgaccaaagcgctgcgactgataatcaaattcgactgataatcaaatga

SEQ ID NO: 192997 - DNA, 254 bp, Arabidopsis thaliana landsberg
aagacgatatagacttacggaaaaccgcccttgccgtaacagccgttgagaagcttatcgtcgaacgaaccaccggacgaaacttccccttaaaaataaacatggtggagaagagaacgaaggagaagacaaacagaatcacgaaccaaaagaacgtccgccatgaaacaacgacgtttccgccgcaaccaccaccaagtttcctacgaactttcatctcctacgccgccgaaatcgccggcgtaatggattag

SEQ ID NO: 192998 - DNA, 139 bp, Arabidopsis thaliana landsberg
ggcaatgcacctgtttctccggtaattgcccgctcgccggacatggaaaagaaggaggccatcagtcctgtgtcgccaccaaagacggcagatgctgacggcgaggctcctgtaccgcaggccttcactgcccgtcaga

SEQ ID NO: 192999 - DNA, 245 bp, Arabidopsis thaliana landsberg
atgctaaccgggaactcaactttaactcagcttggtcttgaggatgagtgtgtggtcactgatgttctaaggtgggttcggtctgctgcgagtgaataatgccctccagaggtttttcatgtagagctattcaagtttcaaaaaatagaagaggagatagttcagatgctttagctagcgttggcttgtgtcgcaaggaatccagagttaaggccaaagatagaagaggttgcgatgaggattat

SEQ ID NO: 193000 - DNA, 233 bp, Arabidopsis thaliana landsberg
atggagatggcggtggctaaccaccgtgagagaagcagtgacagtatgaatagacatttagatagtagcggtaagtacgttaggtacacagctgagcaagtcgaggctcttgagcgtgtctacgctgagtgtcctaagcctagctctctccgtcgacaacaattgatccgtgaatgttccattttggccaatattgagcctaagcagatcaaagtctggtttcagaaccgcag

SEQ ID NO: 193001 - DNA, 204 bp, Arabidopsis thaliana landsberg
gttatcctactactcttgttctggcaaccaggaacctgatcatgaacagctcgttcaccggtcaaaccagctggctgacgggtggtgtagttggtttcgaattcaaccagttgattcctgccggtaccaaattcggtgttgaagtaaggtatttcggtgatgttcaggattcactgggtgtactcaatggttttgttgacgaag

SEQ ID NO: 193002 - DNA, 69 bp, Arabidopsis thaliana landsberg
atgcgctcagccttgcggggcctgttacaatgggccgaattctacgtggccttcgcgttggacgaggcc

SEQ ID NO: 193003 - DNA, 392 bp, Arabidopsis thaliana landsberg
atgaagtacgcactgatcactttgggttggaatccgaatccaagcccttgcactctgagccgtaaggctttctactcagtagatgggggtgaaccaacttccattgaagcaagtggtgttgtttcagttcaaactgaaattaaagccacttcctcagttgtgttctggaccgaaatcactgatgatgaaggcaacgtagttaccagtgaacgtcacagctttaccatcggtgatggtgaggttcctcaagcagacacgggtttgtttcacgtcattgatggctgggtggaacgccctgatgtccctgttgacccggatgtggacccggaccaaccagtagacccagatcagccagtagacccgaacgataacccaatcatggctcgtcgtcg

SEQ ID NO: 193004 - DNA, 270 bp, Arabidopsis thaliana landsberg
aagaacactccgtggctatcagtgccacagtttggtgattgggaccaaaaaggaggaggaacaatgcctgattactctatggatttcactaagattagagagatgaggaaacaaaacaagagagacccttctcgagccagtttaggcaatgaggaagagctcattaagccacccgagtcagcaacatcaactgctgagcttaccacggtccaaagtgaaaaccaacgagagttctctcccagccaccatcatcaaccacattctccttct

SEQ ID NO: 193005 - DNA, 127 bp, Arabidopsis thaliana landsberg
ggtttcttcaaataacagatctttgcaagactctcaaagaacaaaagaattattcgattaacgcggacggtgttcttgatattattattgaaaagatgatgattcgatcgtacaagtgtttagaaag

SEQ ID NO: 193006 - DNA, 345 bp, Arabidopsis thaliana landsberg
  unsure (1)..(345): unsure at all n locations
agaagttagataaatcaatggatgattatattaaggagataaagcgcatctgtgaacaacttactgttattggtagtcctgtgagtgagaaaatgaagatttttgctgccttacatggtcttggaagagactatgagccaatttaaacatcaatcgaaggctccatggatcttgnnnnnnnnnnnnnnnnnnnnngtatcataccttggttaactggctttgtggataggcttgcatgctataacacaggcgtggaagtttcacctcatctggccttctacacaaactactcaggaaaaggaagagggtatttcagtgggaagcctagtggtaattaaggaaaag

SEQ ID NO: 193007 - DNA, 70 bp, Arabidopsis thaliana landsberg
aagggatcgagcggcaattgccacacccgctcgccggtgacgcggtccgccgacagcatgcggacggcca

SEQ ID NO: 193008 - DNA, 100 bp, Arabidopsis thaliana landsberg
cgtccgaccaacaaccgtcgtttccaccattggcacttgctttagcaacgccaaaaatccaatgaatccaattaaacgagctttgattaaagaaatctaa

SEQ ID NO: 193009 - DNA, 380 bp, Arabidopsis thaliana landsberg
atgatccggttgaaagccgtgccgctctcgtcggtcgttctcggaggccacgcgaccatcctcacgccgacaggcatatccttcgtcgccgactgcatgcggcccgctccggccgggaccagcttccgccaggcattgcgccagtcgcgccaattcgagaagaatgatgcatcaatcgactccgcgacgagaatggttctcgaccaggagcgaagggacttgctgcagattattgagcgggatgtctcgttcgcgagacgaccgacacattcgcctcttccagcgccatcgacaagagataacgcaggaagcccaactcgccatcatcggcgaactgccggatctcgatcaaggcatcgcgaatataggctgcgcgaacg

SEQ ID NO: 193010 - DNA, 731 bp, Arabidopsis thaliana landsberg
atggtaaaatggtcggagttgccaccggagattctccacttgatctcccttaaaatcgacaatccctttgatctgatccactttcggtcagtttgttccttttggcgatcctctagtctcctcaaattcagacacatgacatcacttagatgtcctcttccccttgatcccggcggttgtggtgatgattgccatatcttgagcagccgtgtctaccttctcaagtgtcctaatcgtgaccgtccccaatattggtaataaaatctgtttcttgtattgattcttgaatcttgatgatacatagatgataattttctcctgccaggatgtttaaactacaagctaaagagaatggagaagttgttctacatagtttgttcttaagaagaaactcctctgcgtatggatgcttgtatccaagtctatctattgatttgctcaattgtcaaatctttgagctagcgcaagaacatgtggcttgttacagcgaatggtttgaattatttgaatgcatttcaaaatgtgaagaacgtatcggatttatgggtctaaacagagagaaaaacgaatatatgattctagggaagctctcattcaatggtctcgcaatgtataggtcagtcgataaccgttggactgagctcgagataacacccgattcattttttgaagggatagttccatttcaaggcaagttttacgcgatagatcgcaccggaaaaacaacagtg

SEQ ID NO: 193011 - DNA, 61 bp, Arabidopsis thaliana landsberg
gttttctgaaacgaaatatcccgctcatattgatccagatgaccctcaaagactctcttag

SEQ ID NO: 193012 - DNA, 114 bp, Arabidopsis thaliana landsberg
ggtccctcgaaagctatggacgaaccatctcgtcacaatcgtctctgcagcctcagtcgtaatgtttcggagaccatagacaaagtattgatactttctacaccaaatctctaa

SEQ ID NO: 193013 - DNA, 385 bp, Arabidopsis thaliana landsberg
atgggggtggaggatgccgagggtaaccgcaatccgatagccgccgttacgacaggcaagaccattggggccgcaccattcgcggctacgctttctgccaaaggctcgaaggattacgatgccgacgacaagctgacttatgaatggaagatcgggacgaaaaagctggcgggcgaggagattaaatacacttttaccaagcctgggacttataatgtggtattgaccgtctccgaccagaacggcggaaagggaactgctaccaccgagttcaagatcggaaacacgccgccggatgtgaagatcgagacgaaggcgaaccgcagtttttactgggataatgccccatttgattacagtatcaaggttacggacaaggaagacg

SEQ ID NO: 193014 - DNA, 816 bp, Arabidopsis thaliana landsberg
atgatcctttgccactccggcgcggtggatccctcgagaccgcttacaaacttgagtcgggtcaccaacaagatcttcacggtgatcaccgagctcccaacgccaccaagccgtctaggtgatgccgatcaccaagagtaacaagccatagactttcgcttgaccaagagaagcctaatgcaagtggtgtgtgctctaggtggctctcactagcgctaatgaggaacaagcgcggattatgattctctaatctcctcactaggcttttggtgcttgcaatgctctaccaaggtgctggaataaatgtggagtgcaagacattgaatatggtgggtggaaggggtataaatagccctcacccaccaactagccgttataggcacctcactgcgcaatggcgcaccggacagtccggtgcgccaccggtgcgccaacggtcgtttccaacggctagttctgacagctagccgttggactcatggcacaccggacagtccggtgcactgtcgggtgcactgtccggtgcgccactaaaattcatctcgtgaaccatgcgctctcgggtttctgcgcgggaaaacccttccccggccaacctagccccacctggcagagggccaccggacagtccggtcccaaaggccagaaaccctaacttctattttctgctgattttcaaatcggttttcgttctaacttgtgagtgtgttctagagtgtcacctagcactatatgtgagtgaatatgcaacaacactacactagaactctcttggtcaaactactcatcgacaacccctctttatagtacgactaa

SEQ ID NO: 193015 - DNA, 380 bp, Arabidopsis thaliana landsberg
atgaagatgaaagaagcatcactgggagaaaaagagaacaataatctattccttgagatcttgaagtccggaatcaacaatctccaaccgagaaatcaagaacccgtcgtttcacaaagcaatgatctgagacaaggaggagatgacattacacttctgcatccatggatccagagatggtgcaagaagaaaactacatcaacagatcaaccagcagggcaagaagctagctttgagccagagagtcacaaggagttcgagaagaaacagtatccgagtattgcagccatggcattgatggggaaggctctgagcggtttaaacccatatggtcttagaaagaccaactctctcatggtttggaatgcaagggatttgag

SEQ ID NO: 193016 - DNA, 54 bp, Arabidopsis thaliana landsberg
gtgtgattctgcaaggaaaacagttcaacgcctttggtgagaagagttctatag

SEQ ID NO: 193017 - DNA, 188 bp, Arabidopsis thaliana landsberg
actgcacagaatttcgttttaatttgatgatttcagttttcaacaatcgtacctctttcgacacgacagttggccaaagattgatgattgaaacccagaatcttcttcgatcaacccagaatctcgtgtttcagttttttgttactagaaaagcaggggaagttataatgtttaatctcagccgataa

SEQ ID NO: 193018 - DNA, 437 bp, Arabidopsis thaliana landsberg
agtggattcccaagtagtccatcagttgattcattgcacggagcttcaaatgggtaagtttctcgttaacaaattagttttgtaccgcgaagtaaattcgataaaatgataaatggaatgattctaatgtgtaagaggtttcatctgggacatgattacagggttgctgatggaagacgctcaattgttcttgttgtcttcattggaggtgtaacatttgctgaaatctctgctttacggtatctcgcctctaaggtatatatcaaacttcaaaagtttaccatcaaaaaaacactctttttgtccgctgaatcctccattcttgcttctgcataaaattttatcaggaaggaatggcttatgatttgattgttgccacaacaaaaatcgtcaacggcgcaacgttgatagaaacattcatggaaaaactaggctga

SEQ ID NO: 193019 - DNA, 294 bp, Arabidopsis thaliana landsberg
tgaccgatacccttctgcggcgatgggaggaaaatgggcagccaaagatagtcgtcacttgcaaaaaccagcaagaaatgtaagcaggtgaaaatcttgggggatacaaacaaaacgcacttcaagacatattattactttactacaaatgttaataagttgtcttcaataaatttgaaagctacatttatcttttctgctctcaggaataagatcacagaggctgctgagagcgttggcctcccgacttttgttgtagctgatgctggaagaactgaggtttgtcgtgcttga

SEQ ID NO: 193020 - DNA, 1132 bp, Arabidopsis thaliana landsberg
atgttaggtatatcactagatgtagatgagattgatcatgagctgaatgtacatgagaaagcatttcaagggatgcgtaatcttcgttttctaaacatttacactaaggcattgatgtcagggcaaaaaatcagattgcacttacccgaaaactttgactatttgccgcctaagcttaaactattatgttgggacaaatacccaatgagatgtctaccttctagctttcgtcctgaaaacctcgttaagctcaaaatgcaagagagcgagcttgagaagttgtgggaaggagttggggtaagtgttttaaataaagtgacaaatctcatattactttttgcacttggtgtatgactttaactttgctctattgtttgttttgtttcgtgggttcagtcgcttacatgcttgaaagacatggatttggagaaatctaaaaacctaaaagaaataccagatctttctatggcgaccaatctcaagacacttaatcttaagtactgctcgagtctggtgaagatttcttcctctattcagaatctcaataaactgacaaagttaaacatggaaggatgtataaatttggagactcttccagctggtatcaaccttaaatctcttcaccgcctagatctcagaggatgctcacgtttgaggatgtttcctgatatctcaaacaatatctcagtgctttttctagacaagacatctattgaagagttcccctctaacttgcatcttaagaaactctttgatcttagcatgcaacaaatgaacagtgagaaactatgggaaggagtgcaggtatgtatttaacctaacttttttaaaccaacactttcatattttattatctctaggttgcacttagaccatctccattggaaggctctaaaagagttttttacaattaaaaaaattaaaatcataaaaaagaaaagagattgcacgcatgctaagattcgagaaagtttctcacttgagaaactctgagatattctctacaacccatcatgacaattctcttttttatttcttaatttttattttatttttcatctagaaattttatttagaactttatgtaatatccatgtgtaaaagacgagaaaggaaatatggacccgtatga

SEQ ID NO: 193021 - DNA, 160 bp, Arabidopsis thaliana landsberg
gaaaaaaacagacaacaaaaagaaaagaaaatccaaacaagaagaagaagacgaaaatcttctgatatttctgacaatggaggttcttttgaaattaccctcttcagagtctcctcttaaggataaatttggatctgttcaaatccatgaagctaataag

SEQ ID NO: 193022 - DNA, 152 bp, Arabidopsis thaliana landsberg
atggaccttataagattatctacacgtgtggttcctgattttccaaagaattattccgataacgtaatacacatacactttgagaggcacaatgacgagaaatatcatggttggtcgatatatatcaacgcgttcacacatgaaaattggtg

SEQ ID NO: 193023 - DNA, 895 bp, Arabidopsis thaliana landsberg
atggcttcagaggatcaatcggcggcgagatctaccgggaaggtgaactggttcaacgcttctaaaggctatggtttcattactcctgacgatggcagcgtagagcttttcgttcatcaatcttcaattgtctccgaaggttaccggagtttaaccgtcggcgatgcggttgagttcgctattactcagggaagcgacggtaagactaaagccgtcaatgttactgctcctggtggtggttctctcaagaaggagaataactctcgtggtaacggtgctaggcgcggcggcggtggaagcggttgctacaattgcggtgagttaggtcatatctctaaagattgtggtattggtggcggcggcggaggtggtgaacgtagatctagaggaggagaaggttgttacaattgtggtgatactggtcacttcgctagggattgtacttcagctggaaacggtgaccaacgtggagccaccaaaggtggaaacgatggttgctacacttgcggtgatgttggtcacttggctagggattgtactcagaaatcagttggaaacggagaccaacgtggagcggtcaaaggtggaaacgatggttgctacacttgtggtgatgttggtcactttgctagggattgtactcagaaggttgctgccggaaacgtcagaagcggtggtggtggaagtggaacttgttattcatgtggtggagttggtcacattgcaagagagtgtgcgactaagagacagtcttctcgtggttgttaccagtgtggtggttctggtcacttggctcgtgattgtgaccagagaggaagcggtggaggaggtaatgataatgcgtgctacaagtgtggtaaggaaggtcactttgcaagggaatgttcttctgtag

SEQ ID NO: 193024 - DNA, 19 bp, Arabidopsis thaliana landsberg
  unsure (1)..(19): unsure at all n locations
nctaggcttcttggattga

SEQ ID NO: 193025 - DNA, 418 bp, Arabidopsis thaliana landsberg
atgtgggacaacttaaacgaaataacacaaactaaaccaaactttatttcggttttgataacttctaaaaaggaccaaccaagattcgaaccaaaccggatccaaaagtgcccttacaaaaagctgttttgcctcaagcatcctataaatacatcccaaaacccatctctccataaacacatcaaattacacactatctacgaaatttacatttctttttcttcattcttaattgctgttcttgttctgtctctcatgggaggtcaaggcagaaagaagttctcgctctttagcttctttaaagcaagaagatcgtctcatcatagagttgaagctgatgcatcatgggacgacgtcatttacacaagaaaggcatgggccagcgacgaggacaagcgttattgggtagctgagccag

SEQ ID NO: 193026 - DNA, 315 bp, Arabidopsis thaliana landsberg
atgaaagtggtgtcacctcgtacacggtcggattcaatcactgagaaggtgtttcgacgagtctatagcaattttaacatctcaacagtagaagatgagtatatccatcgtcagagatcaagtgattatgagaaggagagtcgtctaaggaagagagggttagaagaaaaagaagaagttatggagatggaacagatgggagcagagaggatcaaaactgttcttattctcatgagtgataccggcggtggcccccgtgcttcagccgaggccatccgcgacgctttcaagatcgaattcggagatgactatcgg

SEQ ID NO: 193027 - DNA, 93 bp, Arabidopsis thaliana landsberg
atgcatggtactgacggtgaaataagtaagacatggatggctcgcaagattttcgaacatgcaccaatcgaggaccgcacaaagcattgcaag

SEQ ID NO: 193028 - DNA, 111 bp, Arabidopsis thaliana landsberg
aggtaccgcggaaaacgagttctcgtagttggatgcgagaactcaggcatggaagtctctcttgatctatgcaatcataatgcgagcccatctatggtcgttcgaagctct

SEQ ID NO: 193029 - DNA, 366 bp, Arabidopsis thaliana landsberg
atgtcaaaagagattgatgcactcgaagctaatcatacatgggatattacggatctaccacatgggaagaaagccataagtagtaaatggctttataagttgaaatttaactctgatggaacactcgagcgacataaggcgcgtctagttgttatgggtaatcaccaaaaagaaggtattgatttcaaggagacgtttgctccggttgccacaatgacaacagttcgaactcttttagcagtcgcagccgcaaaagattgggaagtccatcaaatggacgttcacaatgcttttctccatggtgatcttgaggaagaagtctacatgaaactaccaccaggttttaaatgttcagaccccaaaaag

SEQ ID NO: 193030 - DNA, 153 bp, Arabidopsis thaliana landsberg
agcgccgtgatcacccgcgaatccgcactgcacttgcaccttcattaccgcgcattgagatcgagtgctcgagcgacgaccagctggacatggagaaccaccaccaccacctgcagcagcagcagcagccggcgctaccgcgagctccccgca

SEQ ID NO: 193031 - DNA, 146 bp, Arabidopsis thaliana landsberg
atgaaaccgatagaaattccgagaaggaagttcatggttataacatgtccaaagagcgcagcagatgctatgccagtaaatattgtggcaactgtcgatgaatatttcttcaagattgtatctgaaagcatcaaagatgaagacaa

SEQ ID NO: 193032 - DNA, 1302 bp, Arabidopsis thaliana landsberg
atgatatgcgaagatgcatatcagtatcagcaattacatggacaaaaggatcacatgatgacaatgatgatgatggacttgagtacatcaccaccatcatcaccactttcaccatccttatcgccaaagtcaccatcatacaataacaacgaggaagagagactagaggttgtgaatttgagtggcatggcattacaatctctcccaaatccttccctcaatttggcaaatatttgcaagcttgatctctccaacaatcatatcaaggttcatatctctatgcatacactcatacacagtcagaatatatgtttctaatgttctttttgggggtttgtctatgaattgtaacagaaaataccagaatctctaacagcaagattactcaacttgatagcattggatattcactcaaaccagatcaaagctcttccaaactccattggttgtctttctaagctcaagatccttaatgtctccggcaactttctcgtttccctcccccaaactattcaaaattgcaggtttcacacctcaaccaaatctggaccaaaccaatcatatatgatgataatgctgataaattcctctgttttcttttgttttggattttccaggtcactcgaagaactaaacgccaacttcaacgagctgattagattaccagacaacataggcttagaactaaccaatctgaaaaagctctgtgtcaactcaaacaagctcataagcctaccagccaccatcacctgcctcacttccctgcgtgtcctcgatgctcgtctcaattgccttatgatcctccctgaggacctcgagaacctcatcaacctcgaaatcctcaatgtcagtcagaacttccagtatctttctgctcttccatcttctatcggtcttctcctgaacctcctcgaactggatattagctacaacaagataacagtgttgcctgagtctattggatgcatgaggcgcctacgaaaactgagcgcggaaggaaacccactcgtctccccacccattgaggttgtggaacagagcttgcatgcggtgcgagagtatctgagccaaaagatgaatggtaaactggtgaacaccgcagcaaagaagaagacatggggtttccgtaaactagtcaagtacgggacattcaatggcagatcaagggtttggaccagggaagagcgagaagggctcatcatgcctgagtaccgtcccattgatatcctaacttccaccaagtttcctgtgacgtgctcacctcgacgtctcttctccccaagaacctatttcagcagataa

SEQ ID NO: 193033 - DNA, 415 bp, Arabidopsis thaliana landsberg
tgtctgtcgcaaggcagagactctacgggggaagtcggcgccgaaaaagaagtctcttcctccaccgctacaggagcagtctagtaaaagtgttacacaaggtcagtctcaacaaaaatcctatgctggagcggtcgaaaacagattttaaacatcaagtcacacgtttctagtcgaagtggtcgacggagcttctttagtggagatatcagacgacctcattcaaaattcagtgcctctttaggaagattttctagagaaaaactttttggacaaggctccccatggagctaaagttcgcgtaatagtaaacaagatctcgcctttgggaaacatatcaattcggattgatgtctatgaagtgaatgaaacaacagtgaaattcagaatcaaggatgcccaaactagaagtagg

SEQ ID NO: 193034 - DNA, 260 bp, Arabidopsis thaliana landsberg
gtaccctcgttcttcattcgcaaacttgtgactcaggttttctcattcatcaacctatcacttttcaacaggtaaatgtgatccaaaattcagttctttttgtatcacttaccgcatattacttttgttttctgtatatataatctgaattcttcttcagtcttcttcttcgtcgtgaatgttgcacattttcaaatggggaatatgtgaaatctgggatttcagaattggagaagtggatagctaatgcgaaggaggag

SEQ ID NO: 193035 - DNA, 251 bp, Arabidopsis thaliana landsberg
atgggattgcagccaaagcctgcaactgtgtggtgtgactcgcagtcagctatttgtttgtcaaagaacaatgccttccatgacagaacgaagcatgtggtagtcaagttctacttcatcagagacatcatagaagctggtgaggtaaaggtcaggaaaattcacacgtctgtgaatcctgcagatatgctcacgaactgcataccagtaaagaagtttgagaaagctttagacgttctaatgctactcag

SEQ ID NO: 193036 - DNA, 271 bp, Arabidopsis thaliana landsberg
atggctagaagtggtggtgatgctttgagaccaacttcagcgtcatgtggaatgagattacgggtaacttctagtgatacagtatctaaagtgcatggtgcatctactgtgagaggtggcttgatgaaggaaaaagtggagaagcttgagacagatgatctaaaatggaccgagaggcttccagaatgtcctgtctacagaccaacaaaggaggagtttgaggatcctctgacttatttgcagaagattttcccagaagcttcaaaatatg

SEQ ID NO: 193037 - DNA, 183 bp, Arabidopsis thaliana landsberg
atgtgtctgacggagactcaaaaaggatcgattttagtcgaccatgagacgctagagacgatcgggaaatttgagtacgacgacgtattgtccgatcatatgatccaatcagcgcatccgatagtgacggagacggagatgtggacgttgataccggatttggttaaaccgggttatcgggtc

SEQ ID NO: 193038 - DNA, 365 bp, Arabidopsis thaliana landsberg
cctccgtgaagagcgagatcgccaccttcttcaaggtcttccccaatggcacgatctgggccaacaccatcgaggaccgcggttacgacctggtgctgatgggccaggaggcgccgctgaagatcgacctgaatgtggtggagcagcgtctcatcagcgacgaataccagctggtgcaggaatccatgcagcagatcggcttcgtcaccgccaccgatctctattccacctatatcgggcggcagtccgacctggcaggctggatcaaggacgcccagatcaacaccgaccgcaacctgcgcctgatgtacctggcccgccggggcatcaacgcccagatggaagaaaagcaataccgcctgatc

SEQ ID NO: 193039 - DNA, 498 bp, Arabidopsis thaliana landsberg
atggagatgaacagaaggagatcaagagggttcatgatagctaagctaatgcccttttgcaaagctgtgaaatctccaactccttcccaagacctttataataatgttcattacacttcttccactacgacttcctacgctcgtcaacctgatttcaacaactacgtaactgccactacgcctctccctcctaaagttagcttcctccttcaaccatgtacgtaattaacctttcttttaaatctactttagctaattatagctatctatctttcatatatacatgtctataattagtgactggcagcctcggctcctgagggtaaggatatggaaaagaagcagaaaatgatggcagagaagctgatcggcagaggaataaacggagtggacgactgcgtagacgctagagccgctacttatatctcaccggttcgagagaggcttaaggcggaccaatattgcgagaaacagacgaccggcattagcataggatga

SEQ ID NO: 193040 - DNA, 108 bp, Arabidopsis thaliana landsberg
atggcaggtaattttccttctctacctcaaacagcaaaagtcaacgtagaagtcatcgaagtaggaccacatcaagacatatttgtcgaatattcaacgtgtgtgtaa

SEQ ID NO: 193041 - DNA, 224 bp, Arabidopsis thaliana landsberg
atggaaatccagcatgtgccattgttgggtgtcggttccagtcacaacgcggcagccaattgtgcaaatggcgctgaaaagcagactgcttcttgcacggatgctttgaaacgagtcatatcggggatcaaagactggaacagaatggtcgcatccctgaaagaagatggaaaagtactgctcggcttgctcaatgctcagcagcccggcgtcgacacaatcgg

SEQ ID NO: 193042 - DNA, 97 bp, Arabidopsis thaliana landsberg
accaaataacgtgaaccgtcaacggcgtagcacacaaagctctcagttaccaactacattcgcgtcacgtgaaatcaaattgatgaactattcataa

SEQ ID NO: 193043 - DNA, 2044 bp, Arabidopsis thaliana landsberg
atggatctatggtcagttttatggaaaggaacccagatctatcgtttgggtggaataaggctaatggatggattttcgattgtggtaagttatgaggatttcaacgagatgggaatctttacgctctcattgtatggagtctgtccacaggaagatgagattttctctcaaatggttttacggagaatagatttggtctgatgtgattggtgattcaccgatatgtcgatctggcgatttattgggattttgggttcaaaataaatcttatcttcaagatagttttcgcaatattgttttcttgtgtcaaaatttaggaagatgttttttttggaatcaaagggggattttccagattatgattgcgatatgcttcaccattcaggttgatatggtttccttatgttctccggtaattacagcaaaagatcagtctctttatcttcacgatttggtgtgggcatcaagtctagtggagattacacgatttttggtattaatgaggtgtgagatttgctgggtcgaggttttgtataaaaagagaagcttggaatgcttacaaaaacacaacttcttacagacttttctcttatcttctcgcttcagggattttgtcatttcaagtttttctcattggtgtgagttttctctctgctgctgggttttgacaacgtctcagagttcttgggtgggtaaaaatgttggtgaacaaaaggctgtttcaatggtaccaaaaaagaggataaagttgtcgcattttgacaactcagatctgattgcggggtattctaagacccttattgggcgttgtatgaatccacgggtgcaagatatgaagacgctgttgtatatgcttcggcgtatttggcaaattgaaggcaaggtggcaggtgcgatggtctctttggtgcgatggtcaccttcgttgaatccgaattattcctcggatttaactttctggattcgggtccttggggtcccaattgagttctgggctgatcaaaccttccgggagataggagcagctttgggatcagtccaagcggttgatgttgatgctggaagagttcgggtcacggctgatggtttcaaaccactgagcttcgaaacggagatctaatatagcgatggtgaagagacgacaatgttttttgcaggatgaaaggctttatggcttttataagctgtgtcatagtctatgtcatgatgaaaacattgcggatgtaatgtggctttgggcagtgagcaccatgttctagttgaagagaagaaagacgggaaccatctgcaaagttatagaggcgcggtcactaggcaggtttcaacatttgaaggaaagaatgcaaatgggttccagtgtaagtctgtttcagaggcccgtaaggatgatcggaaccacaacggcgcatcctcttcccagccaagaaaatttgctagttatacccaagtcaatgactctcgtttctcaaaggtgggtggttatggaggcaagaggaaacaacaagtggttgaggagttgtttgttaaggaatcaggagggacacaagtcaagtctacggaggtctcacaaccaaaacaggttagaaaagcgctatttacaacggcggatcagtcaatggtggcacaaatgggtgttgatgcggatgggccgtcaattgaggtagaaactgcaaaggaagttctccatgaagagggggaaattacagaagctacaatggtagtaaacaacatggagagttctattccattgagtaatgtgtcgggtgaggaaaatttggacaaggtgctttctaatgagcttgaacggggagaacaagtgttcatgtcaactaaagaggtggacgaagatgactcaatggtctcttctcctctgcagcctgaggatccggttgatgaggtggaaaagtttgcaaaaaaattaatggatgcgacaaggcttcaagaaggtgttggtgcagagaaatggcgatgcaggaaactgataccggtaagattggagatacagaggcggctcgcaaagggaaaggaactgcgctacttctag

SEQ ID NO: 193044 - DNA, 52 bp, Arabidopsis thaliana landsberg
atgcgtgagatgcagaaacggagttcggaagcggagatggagaaagaagaag

SEQ ID NO: 193045 - DNA, 166 bp, Arabidopsis thaliana landsberg
atggtgctatgcgctgaatgtacgcgtcttcgagaagaactacacaagactagacctgactacttcaaacgcttattgctcctaaataccgaacgtcatcatcttttaatcattaaactagagccaaaacgcatcctagtgggctataatgcctttgacttcacac

SEQ ID NO: 193046 - DNA, 422 bp, Arabidopsis thaliana landsberg
atgttgatcatgaaagagcaagcccggtaccaccaacgcgacagccgcgccgatcgggtttcaaaaccatcccggacaagcgaattccgaaagctggtgggaagccgataaaaacgatccctacctccgtggttggagcgtagtgacaataggcacaaagaacgacggccttcccggagaggttatcatctcttggttcaagcccctggacgaagccttcgaccgcccacatcgtactaaccagatttacatgatggtattgaacgcgctcacctcaacaaatggcacggctgcggactgcagtcaggaaatcacgctgaacttcttgaggacgctgaaaaaagtcgtcctgctcgatagcgaaacaggaaaaccgcaggcccagaaattacccttcactcccaataaaaacaaatcacgcc

SEQ ID NO: 193047 - DNA, 530 bp, Arabidopsis thaliana landsberg
ggagaaaaccatcgagtgaggaaaaaggatctaatggtttggataggaaatatgctaaagaacaacatgctgcagttggataaaagcttctatgtacaaatagctggaatacctcagggacacagattatcatccttgttatgttgtttttactacgggcatctcgagaggactttgatctacccattcctcgaagaagcctctaaagatgtgtcttctaaagaatgcagtagagaggaagagcttataattcccacgagctataagttactgagatttattgatgactacctttttgtgtctacctcaagagatcaggcgagtagcttctatcacaggttgaagcatggatttaaagattacaactgcttcatgaacgaaacaaaattctgcataaattttgaagataaagaagaacatacgtgttcttctaatagaatgtttgtgggagataatggagttccttttgtcagatggacgggtttgcttattaattcccgcacatttgaagttcaagttgactacacaag

SEQ ID NO: 193048 - DNA, 156 bp, Arabidopsis thaliana landsberg
cccaagaaactccctgaaggtaggaaacagctaaatgcagctaacaaacaggtgaagtttgtccagacggacatagaacctcagactgcgatgcgaaccaccaagccccttggcatggcccccccaggatacgacaagaaaagagcacgagaataa

SEQ ID NO: 193049 - DNA, 476 bp, Arabidopsis thaliana landsberg
atgttggaggttgagaaagcaaaactctttctacataaaatccctaacaatgtgccatctgaagagcttgagcaagttctttctggaaagtttacacttgatgtgaaggttgagaaatcaaaaccatgtactttctctaagtctctcgaacatagaacctttctctgacctcagctatttttcttttggcagcaagcaaaaacacagggacgttactattgtgcatttgctcttttccatagttcagaagacgcagatcaagcatttgaacacattgatggaatcgaaatgacggtataattttagtatctctgcttttggatccgcaactatcttgatcgatagtgaaataagtttgtgtgttatgtttttttttttaggattcattgggtttgccacaaaaagtggtcatcattaagctgagttcaggatcaagagctagtatatatgtccgtaaaatggttcaagatgaatga

SEQ ID NO: 193050 - DNA, 216 bp, Arabidopsis thaliana landsberg
aagcttgtggagcctatggatatgcagaattacttccactcttcggcttcgcatccgttttatagttactcgaagttagatgatgctggtgctatccttgagagaaacgaagagttctctttcggaactataatcaagaagtcggtaatgcattttccgaaactagaagactctgatgctttgccttcgagcctttctcttcttgctgaaaactag

SEQ ID NO: 193051 - DNA, 172 bp, Arabidopsis thaliana landsberg
agagaagaagcgactacaacttcttccggcaacgatcagtttgcgttggccgttttttatctggcatcgtttggttttcttaactacgatgaccggctctcttctagatttggtggcttaatcagcatcattggctccctcttccctggcatctctcggctttttcaaaaag

SEQ ID NO: 193052 - DNA, 122 bp, Arabidopsis thaliana landsberg
atgaacctccacaagaatccgccgtttcttgcgtacctctcagcttgcgggaccggccagatcaaagacgataaattaattgatgagaccattcccttgaccagcgccttccagctggcgag

SEQ ID NO: 193053 - DNA, 728 bp, Arabidopsis thaliana landsberg
atgatgttcctctgctcgcgagagagtgggggaagagtttgcaaagtaggtaatcagctagtacaccttctgctttaatagaggaaacaatgtcctcaaagacttccaaatgatccaatgggattcatcggaagctcctctaaactttcctctagatacaagatcatagtaggcagggtctatagcaaagtcatctctttcaaaaggaggtagcttgaatgctgatcggtttgtgtagaagagatcagttctgttaaaatcgcctattgtagccgtctggttctacagagggtgtcgatcgacaccagagttgtgtcagtcgacaccatcgtgaaaatctgccatgaaaacgtgagtctcaatctgaaggtacctgaaaaacaagagaccaataaacaaagaaacacgtgaataggtggtagaaaagttgtatttagacttaaaaggacactgttggggtcgaatttggtcaaaggaaccgagccaatcaaacagactccaagaacgcctcggaaaccaatctttaagatatttcggttcgggtgccactccaggacgcggaccccgagctggtggtagtaatatctcccagatcacgtcggagaaccatcccgagccaaccacgaaaacacctcaggatcattgcaaagagcctcccgacccgaccttagaaacgcctcggatactctcagggaaccatcccgaggcgaacctcaaaagcacttcgg

SEQ ID NO: 193054 - DNA, 1501 bp, Arabidopsis thaliana landsberg
atggctttgtttgctgaagccaatatcagtaatggtcaagtcctgctcaagaaacgacttcacttagtgaggcagtttaccccacacatccccaccatagtacatcatcggtctttctgttaaattagataaatacaagatcaaggtggggacataggtgtatcatatatccaggaccaaacaattgatcaaaatataccaaacagtcggaaagatttaagcttttatactaaacaaatttcttaaactcaccagacaaatcaacactagggtcattgtatagatgcattgcagctgtccaacctacaatcaaaatagtcaatttctttacaatgagacaaaataaaaaaaaacatatacaaatcaagtacttgcataaaagattggcactagaactttgctaggatcagaaactgaaacttgctttgatttctcactgaatcgtaaaacacaaaccgaatcaaagcacaatctcccaaggtcctaaaccagactcaataactcgaccccttgccacatctcataatgtttagcatgagtattcaatattactcttatcaatctcctgattcatactattttaaccgtagcaacataaatactaaacttgtatctagtcgagttaaactggcagacatcgagattgatacagaagccccataagatgattaaagactgaagtaagaatacatacgatcactgagaagctgaaaagcttcactcctagagcaaccctctagtgatataatctttggagaagagttttccctctggaaaccaacagcaacagactgactgctctctccctcattactatggaagctttctgttccattcaaattcagctcaatttacccttactttaaccaagaacacacacttacacacattacaagcaaaagtggttaaagcttctattagttgctaactaaattcttaaaaaagggatcttctagagaatgcaattttacagaaacctccacatttctcaatacagtgactacaaaaaattacaggtttagcaataatcttattatctataaaaatggttcttaagttcaccaattacacacaaagcaataaagtgaaacagagcgtctctctatacagtgagataagctctattcctataaattcgctatacaaaatcgaagaagagagagacaacgaacctcttgatctcctccggttcgaggaacggttcctgtgaggtagagaaggaatctcagaaatcaatcgaaagcaaaggagaaagagaagacgagaatgaacctttggttaggtggagtgtatcgtttaggggcggaggttgaatccaccagtgaagatgatgagttcgggttctgcatctccttccaatggagatctctctgcgtctcgaggtcgtcgaatagcctctgctcttcacgcgctagtctttcagcgcgtgcatttcttaacaccttacttgttaagcggaaaccgaataaaaaaccgaccgaaccggaaatttggttgttag

SEQ ID NO: 193055 - DNA, 877 bp, Arabidopsis thaliana landsberg
atgacgaaggggtggcttctgattgttttggtgcttcaacttctggttcgcttgatggtactggtgcttcaacttctggctcggaatctggtgatggaggctggacttgatttgaacactggtgaatgatttgaatctgatggtgcttcgatgtcctcagagtctggggtcggagcttgaaccggtgttgagatttctcctgattctgatgatgaaggtgttggagcgtttgccattggcgatgttgctggtggtagaggcgttacaggtttcggtggcggtgagaaaactggaggaggaggagagtagataggtgacggaggtggtggagagtggactggtggtggtggagaatggactggaggcggcggggagtgaactggaggaggcggtgagtgaacaggaggaggtggtgagtggactggtggcggtggtggagagtggaccggtggaggcggggagtggactggtggaggaggaggtgagtagattggtgcaggcggtggtggagagaaaactggtggtggtggaggtgactggaccggtggaggaggagagtggactggtggaggaggagagtggactggtggtggtggtgaatggaccggtggaggaggagaatggactggtggtggtggtgaatgtactggtggtggaggagagtggactggtggtggtggaggagagtgtactggaggtggtggtgagtaaaccggtggtggaggagaatgcatcggaggaggaggtgaaaatacaggcggcggtggggaatgaaccggtggtggtggtggtggagagtgtactggaggagattgtggcgacgttgtctttgtctcttctgtcgagggtgatggtggttgaggacgacgttttttaa

SEQ ID NO: 193056 - DNA, 232 bp, Arabidopsis thaliana landsberg
atgttacatgagcctctctctttctttttcttaatcgagtcggaggatgatttatcggtgcgacagcttttgaagttcattttcacggtaggtcgattagtcggacacgtcgctgtggaggttgagggaatcaaaggtgaaggaaaaacctctataattgaattttgattaagctcagggacgatcggaccaatatcggagggaagagatgacaaagcgagatcttgtatag

SEQ ID NO: 193057 - DNA, 129 bp, Arabidopsis thaliana landsberg
atgccctatgagtacacaccgccgaagtacgcccaggtgatcgaggagctccggcgacggattgagtcgggcgagtatccgcccggatcgctcatgcccagcgagtaccacctcagcgaggactttcag

SEQ ID NO: 193058 - DNA, 162 bp, Arabidopsis thaliana landsberg
gtagcagctgtgtacacaacaggagaactgaacgtagaaagaaacaagctaagaatgaagatgatgtggcgtgtttctattggagacgtgatgtttcctttagtggtggctcagatactttcggatcaaagaaaaaagattgcgagaatatttggagcttag

SEQ ID NO: 193059 - DNA, 378 bp, Arabidopsis thaliana landsberg
atgggggtaagttacactcgattgacaacggacccactatgtataaccaaattattatagtggttttttttctgtctatatagtattactctctaatgtttcctttttctttagactaaagtaacttgcaagaatatttatagcagcccacttcagacagcaacctacagctttaacacactactctctctctctcaaatgggaaaacaaatcaacatagagagtagtgctactcatcatcaagacaataatgtttccgttataacagccacgatatcctcctcctccgtcgtaacgtcttcgtcagactcttggtctacctccaaaagatcgttagtgcaagacaatgacgccggagggaaacggcggaagaacaac

SEQ ID NO: 193060 - DNA, 229 bp, Arabidopsis thaliana landsberg
atggcgtctaatcgagaatcagcaagaagaacgcggatgcgtgagcggatgatgaaagaggggttgcaaatgcaagtaaaacaactcatggcgtacaatcaattcttgtataacaaatatattagcttgttggagtacaatcaccagatcttgcaagagaattcacagctcaaagagacagtttcatcctttcatgatcaatatactatatcttatggaaaccatgaag

SEQ ID NO: 193061 - DNA, 173 bp, Arabidopsis thaliana landsberg
accaacgatactggttgcgagcaaactatggtgtatcaaacaactgggtgcgcgcgcgctcgggcgattggggaggattcggcgacgccaatatatgcgggagagagacgggtggattcgggatgcgaatgttttggggagaggatgaagatactgttggacgaatcaataag

SEQ ID NO: 193062 - DNA, 239 bp, Arabidopsis thaliana landsberg
tcatgtccgaagaggaaaagttcttattactgcagtggccactcttgaaaccaagtatccggctcaaaaagaaaacgaacggagctcttctttgtcttctgcttcttcgaaatcctcaaatggaagtgctgatgatggcgaagaacaagtggatgacagagaaaagttgagaaggatgaggatttctaaggcaaatagagggaacactccttggaacaaaggcaggaagcatagtccag

SEQ ID NO: 193063 - DNA, 2027 bp, Arabidopsis thaliana landsberg
atggaggagtgcagtatgaggaaactggccttgtggcacacgagaaccttcaagcctgttatgacgcacgaggagcttgaaccaatcatgtccaccatgggcttcgtcgctcaggccaccggagcaggaggaggattcaaagagtacgttttcctctcttctcccaccaccaccaccaccaggcccaggctgccctatccccacatcgacggcctccatatcaccacctaccaggcttttattgacgcactgaccttctttcttgatgtctctgatctcttccatgtcaggtacacacgtggatatatgcccactttctcatttacatctagatggataatgaatgttgatgatgcaggggaatgccgctgcaacgtgccaaagataacaacagaaagtggcgtcgcatggaagaggacgaaaatgtgtttgtctatagagatgggacgctggataagtcgactcacggttgtcccatcaaacaagagtcatcatcgtatacacatgttctcatccacctcaaaccgctacctcatttcactcttcttccccttaaggacatcattgtctccgtctaattatcggcagtgatttgtattaaaatgacaaactctatgttattcacttatcgatttaaaagtcttatgttatctcttaaaaaatttatattcttttacgagtgacttgaaaagtacattcgaattcattgtcataatgtcattgtaaatgttttaatcattgctttttgtttataaattcttacaaatacgagaattgaataaacacggccggtacaaaaagtaatagtacaatgtttgaaaatagaacttattttattttattatgggcttcttagtgagggcccattgaattaacaaaagggctcaagaagttcgtcttgcgtctcttgtcttgattctgtgtcgtattgaaagtgggcctccgaatgagatgggcctggaaaacgtatagttgttcccttttttgttttttttattataattggtctgaaacggactgtcaaagtcaaaacatgtcagagcaatcttttgtcgcatccccacaagtcttgaaaagcggagcctgatgatcaaaaggaacccccaaaactctctcaaacgcatcacttttgtctgccacctgtgactgactgtgaggatcccaacaacacttcttgttcatggattctgggcttcagcaactcgcattgtgcctcttcttcattctctgccgcctctttcaagccactgccgaagatgactggaagatagccacagccacgctttctagagacagggacggctcctcctccgtcgctactggttctcttttctctctctcccccctatttttctttcttctttcatcaggactaactagactaattggttctgataggaggcgcttgtgggtatggagatctgaggcagagcagctttgccggctacagcgcaggcctgagcgggaagctgttcaacaggggaagcagctgcggagcttgtctagaagtgcggtgcgtgaactacatccgttggtgtcttcaaggcagcccctccgtggtggtcaccgccaccgatttctgtcctcccaattcgggactctcctccgattacggaggttggtgcaacttcccaaaggaacacttggaactatctcatgccgccttcacagggatcgcagaaaccagagctgagatgatacctatacagtataggagggtcaagtgtgggcggagaggcgggttgagattcagcttgagcgggagctcccactttttccaggtgttgataagcaatgtgggcctcgacggggaagtggttggtgtgaaagtgaagggccacacaacggcttggatcccaatggccagaaactggggacagaactggcactcctctctcgatctcatcggacagtctctctctttcgaggttactctcaaaggcggcaaaaccattgcctcttatgatgtggctcctccgtattggcgcttcggaatgacataccaaggaaagcagttccactcctga

SEQ ID NO: 193064 - DNA, 123 bp, Arabidopsis thaliana landsberg
atgcccatcaccgtgactgatgacttcacacgcctaacgcttgacaccattgctctgtgttcaatgggtacccgcttcaactccttctatcatgacgacatgcatcctttcgtcgagacgatg

SEQ ID NO: 193065 - DNA, 12 bp, Arabidopsis thaliana landsberg
atggaactgcag

SEQ ID NO: 193066 - DNA, 59 bp, Arabidopsis thaliana landsberg
ttaaatcggtgtcgtgggatctagatccaaaagcccttatcgcgtaccggttcaactaa

SEQ ID NO: 193067 - DNA, 242 bp, Arabidopsis thaliana landsberg
atggcgtcagtgctcaagcatgaggcgagtgaagcacgcaccccgagcgaaaacctctcaaagttgtgagtgagtgattaaacaaggccaataatacatgcatacaattaatcaagcatcatgcatgcacctacagggaaattaaggaagaaataatatataggaaaaagatcgtttggttgttgctccacagtactgccgctgaagaagataccggtatcgataccagtgatgttacatga

SEQ ID NO: 193068 - DNA, 142 bp, Arabidopsis thaliana landsberg
atgctccacattcacacaaacccaactgtgcttgtgatatacaaatatgatatggactgggcagatatacatagatacagtgccaaccctgtgaaggcgttcatgaaccacggagggctacctccaatcaacgaaggggccg

SEQ ID NO: 193069 - DNA, 141 bp, Arabidopsis thaliana landsberg
atgtcagctctcattcttatatcagacatgattgcaattaagtacaacagtgggtctaaaagagttgtatgtttaagatgtggagacattggtcatgacatgattttgtgcaagtatgagtactctaaggaagatttgaag

SEQ ID NO: 193070 - DNA, 600 bp, Arabidopsis thaliana landsberg
atggacgttcacgcaggatctcctccacattctggctgcatggtggtagcccaaactttggatcagggggtcgctttagagggcagcatccccactggtctggcattaggctctgttgaaagtactgagctcgttcctgctggtctgctgcaagctgcttcgggtggtggtccggcacctggttatcagctgatttctcctggattgggaacacttcgctcttttccaacctccaagtgctgtgctgtgctttagtttgatctttatgttgcatgaattgttgtcattatgttcatccgctcttcttatcaggctttagtggatggaatggtcagccagctgaagtcacatgggcttctatcccagaagtggcttcatctcttgagcgttggaatccggtgttgcttcatcgtcgtgtatccaagttggaggcaactaatgctggttagcgccctttcttcttcttcttccttgcctttgttcgtggaatgttttaccttctaacctcatttcgtttgattacctcttgataggaatgactcggcagattgcagctcttgaggaaaaacattcccgagatcaagctgagatggctcgatg

SEQ ID NO: 193071 - DNA, 961 bp, Arabidopsis thaliana landsberg
catcaaccagtcgccgtcaccagtccagtcgtgcagacaaagtggtcccatgtgccattgactttcgacgccagagacgtcgacctgcgcacgcaccccacatcgatgccatggttatcaactgcagcgtgtcaggatgggacctgcacaaagtcttagttgacaacggcagccaggcggatatcattttcctccatgccttcgaccgcatgggcatcagccacagcttgcttaaaccttcgaacaacccattgtatggcttcggtggcaaggacacctttcctgtcggcaaaataaagcgtaccgtctccttcggtgtagccccaatgcacgaagcgagcaagtcactttcgatatcgtcgacatggtatatccatacaacgccatcatgggccggggctccatcaataagttcgaagctgccatccacggactgtacctatgtatgaagataccaggtccgctaggcgctatcacggtctacggcaaccagcagacggcgcgcaacatagagcgggacttcgtgcccggtcagaggaacgtgcactgtcttacgacccagtgcgaggtcccagcgcccgccagcccaaccgataaacagcacgacaaggcacagctgcagagccaagacgggaccaagactgtccccctcgatcaggccacgcccaagcagacagtcactatcagcgaataccttacctcacatgaagaagtgaagcttctctgctgcctgtccaagaacaaagatgtcttcgcctggtccgccctcgacctggtcggagtcagccgatcaataattgagcacagcttgggaattgacccttcggtgcgaccaaaacagcaaaggcttcgcaaaatgtccgacgaaaagacagaggccgccaaggcggaggtgcaccgcctcctagaggctagattcatcgagccagtgcgttacccacatggctctccaatgttgtaa

SEQ ID NO: 193072 - DNA, 242 bp, Arabidopsis thaliana landsberg
gtggatccgtaatcatttagatggagaaaatataaatttagggagaaataaactaatgcagagattaaaggattttggtgagtaatttcgtgcttgacttctaaataagttttggtcatttcctgaaaaataataaaaaaattcgaatgggcactcgataattttcttgtatttagactaacctaattaaggtgactcattcgtcaattccaaaaggaaaacgttttttcgacaaattgtga

SEQ ID NO: 193073 - DNA, 105 bp, Arabidopsis thaliana landsberg
agaaatatcacgtttcaagctattgaaatgagtgtgaaggaattacgtgcactcaacacggaaggcttaggtggcgaggtgaagcatcagcctccatgcgcctag

SEQ ID NO: 193074 - DNA, 475 bp, Arabidopsis thaliana landsberg
atgtttattgatggaccaactcctgtatttgtgccttcaccggcttcaagaaatattttcattgtacgttttgatcctttgctgcaggtgatctggactgctcatgcgggttccggttctgaagtaacggcacgcagcattactaccgacaccgatggaaatgttttcattgccgggatgttcagatgcaggttcgatgattacggtgaccatttcggccctggcatgtattacagcatcggttgccgcgatgtttttgcagccaagtatgacaatacggggaattatgtgtggtcaaaaaatgcaggtggacccaaagacgacctttgtagtggaatttcgttatctgatgatggtttccctatccttgccggaggtatgaatgaagagttcagttttgtatcggtgcctggtatatttcccgagatcttttctactatgacgtcctgtccggcaattggacaggattgggccg

SEQ ID NO: 193075 - DNA, 370 bp, Arabidopsis thaliana landsberg
aaaagctgaaaccaacgttgagattcttggattcactgtgcttaaagactctcaggttcttgtgaacgtgtgggccataggacgagacccacttgtatgggaaaatccgacccattttgagcaagagaggtttttggggaaagagattgatgtaaaaggtacagattatgagcttacaccgtttggggctgggcgtagaatttgtccgggactgcctttggctttgaaaacagtgcatctcatgcttgcttctcttctctatacctttgagtggaagcttccaaacggtgtcggttcagaggatttagacatgggagagacctttggtctcacaatgcacaagacaaacccgttacttgcgtgcctctga

SEQ ID NO: 193076 - DNA, 507 bp, Arabidopsis thaliana landsberg
cgtggcggatcattcgctatcctgattctctctttgctcgccttatgaaagcacgatactttaatgatgagtcaatcatagatgcaaaaccaaagaagtatcaatcttatggatggtcatcaatcataaaagggttggacgttattaaaaaacagaacccgctaccaagtaggtactggcacgtcaataaacataatgaaaactaatttagctcccactcacccacctcggtctttaaatcttgtgactccaatccaagacttatatctctgtgatctcatgtcaactattggctcctagcgctactggaataacttcatgctcactaacattgaaaatgttgatcgtcacatgctccttaaaacatacctttcgagaaatgtttcttcagacaagatcatttggccataccactattctggagagtatacagtgcgttcgggatatcgacttttgacccgtgatccgactcaaattcagctgaattcaccacctcctcatggctag

SEQ ID NO: 193077 - DNA, 221 bp, Arabidopsis thaliana landsberg
ggtttgtgacatcgaaggtggcatgttgtggacaaggaccgtacaatggcataggactatgcacaccagtctcgaatttgtgtccgaatagagacttatatgcgttttgggatgcgtttcatccgacagagaaagccaataggatcatcgttaatcagatcctgaccggtaccaccaagtatatgcaccccatgaatcttagctctgctcttgccctatga

SEQ ID NO: 193078 - DNA, 828 bp, Arabidopsis thaliana landsberg
agagaggtacaagaacatctactgatcgtagccgtatacgttgatgatctctttgtcacaggaaccagcttagaggttattaataacttcaaagcagagatgtcttctagattcgatatgagtgatctagggaagttatcatactaccttggaatcgaagtaattcaacataatgaaggaataatgctcaaccaaacacggtatgctcttaagattctagaagaagctggaatgcaagattgcaacatggttcacacccccatggagaacggtttacaattgtcaaagtcagaacatgagaaaaacgttgatgccacaacctttagaaagaatgtcggatgctttcgatacctactacatacaagacccgacttatcatattctgttggatgcttcagtagatatatgcaaagccccagagaatcacacgctgcaacaatgaagcaatgtctgaggtacttgaaaggaactactacacttggacttatcttcaaacggtgtacgagtataccaaggttagtgggttatagtgacagtagtcacaatgttgatcaagatgatggtaagagtacagcaggacatatcgtttacctcagagagagtcctatatcgtggtgttcacagaagcaggagactgtagctttatgttcgtgtgaagctgagttcatgggaggaaccgaggcagctaaacaagccatttggcttcaagacgtgctaagtgaaatcacggaaactgcgtgtgaaaaggttatcatacgacttgataacaagtcagccattgtactcacaaagaacccgttgtttcacggtagaaataagcacatttag

SEQ ID NO: 193079 - DNA, 211 bp, Arabidopsis thaliana landsberg
atggagactgtagctccggtgacatctcccccaaagaaacgacggcagaagaaacctaaaaactatgactccgacattgaggacatcacaccaacttgcaacgacagtgttcctcctcctcaagtcagtaacatgtactctgtacctaacaactctgtaaaagagagtttttctaggataatgagagatctgaatgtggagaagaaatcag

SEQ ID NO: 193080 - DNA, 126 bp, Arabidopsis thaliana landsberg
atttgcaacatcttgaaaaagaaacatgagaaagcaaaagagttacttgtccgtgctgtagtaaacaacaataagttactgatgctcaaccatcctttatatgaagaccagatatcctttttataa

SEQ ID NO: 193081 - DNA, 206 bp, Arabidopsis thaliana landsberg
atcaatcaaccacaaccatcgcaaatccaggagaggtggatgataggatgaggcaactatctcacagtgaaaccgagtctcaaagagacgtgaaacaaaaaagactgattctcatggaagtattcaactcgacccaacacacttttggaggtccaatgatagtaaagccaaatcattgtgacccacttctcattcgcacaatttaa

SEQ ID NO: 193082 - DNA, 804 bp, Arabidopsis thaliana landsberg
atgattcggagaagacaagccgtgcaatacatcaaacatttcaaagccaccgtccagttacgcgtgtgttccacgcgtaacgagacggcgcgtataattggtttaaaactggaagggttgctctgtatgtatctatagatgaattgaacgttttcgatgtccattgagacatcgttatgactcgtcgctttgataaccgccgccgtgaatttttcatccgtcgcggtgatgagactgagtttgtcctttatagctccggagacgcgtctccacaacttcatttttcgtctcatgacgatgttttagttgttgatgttttgtaattattctacgaagatgatttggttatgatttcaatttagacttttagttgttgtaacaaaattagtttcttactttgaaacattttttgtcaaaacgcaaattgagagtttttagtatcttacgtgttacgttatgtatctgtaaattacaattagcagctttgagataattcatataacaaacaaaaaaaatgaaaatttgcgggtagttgtaagtgttatctgcactagtttacacgtgttatcactagtagccgttggattaatctctggttcttatccttgtgatgaggttggtttgttcaatggtgcagctactttgtttcattgaaacgtgaatacatggcgatttcaaagccaccaccactacatttcactttctttcacaatcaagattcttcaattgatacatcggattcaaacttagcactttctattgatacatctagaagacgaagagacgttttgctcacaatttcag

SEQ ID NO: 193083 - DNA, 104 bp, Arabidopsis thaliana landsberg
ggcaagggaattgttctattatttgaaaggaggggtagttgattttggcgaagagcatagcgaggcttgtggacattctcggtttggaagaagatacgaacaag

SEQ ID NO: 193084 - DNA, 198 bp, Arabidopsis thaliana landsberg
cgcgacctcaataacgacaccgacgacgatgacgaagcactcgagattaacggtggccgcctagctctggtcaagaccaccactcgcggttccattgtccaggccgacagccccaatggtccgcgactatcgcaagtcatcgaggagaaggaggtcgcctgccttgtcgttatcaatgccatcaagctggtctaccag

SEQ ID NO: 193085 - DNA, 101 bp, Arabidopsis thaliana landsberg
tgatccgattagcgcgcacccaatctgaaatcaccggaaaaaaatctaattcagaaaaacgcgtttgccacaacgatgagacgaattcagagaatcgatga

SEQ ID NO: 193086 - DNA, 78 bp, Arabidopsis thaliana landsberg
caagagagatttctgaattcggttgttctaatttctcaatcgctgagcgatatcgtcggattcgcttgaagattacaa

SEQ ID NO: 193087 - DNA, 164 bp, Arabidopsis thaliana landsberg
ccgccgtagatgatactccccgcaagaaacatgtgcgttataatgtgatcgcgttagttcccagctttgtctcgccaccaagaatcatcgtctacgccgcctgtcgtcgtagctatagggaggagctgagagtgaaggtcaaggggaagaatgaaaatctctga

SEQ ID NO: 193088 - DNA, 96 bp, Arabidopsis thaliana landsberg
gatgaggaagaaaatgaggaagatgaaagggaagaagaagaagaagagtgtagcgaagaagcggacagtgaaaataacaatgacaacggctattaa

SEQ ID NO: 193089 - DNA, 160 bp, Arabidopsis thaliana landsberg
caaaaggaaaaacatcttcccgaaaaatgacatcacgagatatgaaaaacctatcttgctcaatatcgaaaactttccatcctttttggccaaatgggtatccgacaaagatgcacaaacgactacgttctccaaatttgtctttatctcgtgcaacacg

SEQ ID NO: 193090 - DNA, 48 bp, Arabidopsis thaliana landsberg
atggaatccaaaattggaacatcaacttacatcggatgctcgtcgaac

SEQ ID NO: 193091 - DNA, 213 bp, Arabidopsis thaliana landsberg
atacctcttggttcgactgaacatgaagatataattaagtggatagcatatggtccacgatgtagtgctaggtcctttactgggtatatagtgaacgggcagcgtttccacacaagctcacttcaaaggcaaaatcaaaatagtgggatttattatgaggcaactgctatgtgtagatctagtgctaaagataactcacaagtggtggatttg

SEQ ID NO: 193092 - DNA, 174 bp, Arabidopsis thaliana landsberg
ggtctgaaactttttatccaaactgacccaaacccaactggacccgacccgaaccagaaccgaatatttagaagtattctattgggtagtaaatcatataccattaatcctaaatccgaacgggttctacccgaactcgaatgggttattcatatgtccagccctattctctga

SEQ ID NO: 193093 - DNA, 4501 bp, Arabidopsis thaliana landsberg
  unsure (1)..(4501): unsure at all n locations
gaatgatttattgccctgtcgtcggtggaaagatagagttcaggtgagttctttaaacatattagcatataatatctatttatatttacatataattctattttataattagttgtatcattatatttcaggaatttgggagaaatggcaaacatgtgcgagtgttgcaaaacaggcctattctattcaaaaagatacttgatcaaatttatagccaacatgatgtggagcaggatgatcattattctccgcatactctacgaacaaacctcgaacaaagtcaaaatgaagggcctagcgatgatgacgtagaagtggatgaagcttcagatgataatgggagtcaatttcctctagagctaacatctgatgaggatcttcaacgagctgctccatcaccgatacccactactaatgaacaaggacgaagttctccgtcccgtaccaatagatcaaatttgggtgttcgaaagacgactactagacgtacaaagtatagaagaaacaactttgagactcaagttaagacatggtttcaacgtcttgaagagtctcgtacaggtttactggatgtcttaaggtcacgacatcatcaaaaagccacatttggagatgctttggctgaactagaaatattgtcggttgaaccgatgggaaaagttttggtgggaagcaaacaggttgctgatgaacgacgaggatgttcgtgatggatttatgaaattatggagtgaagagatcaaaattcagttcttggaaaagcttgttggcgttgatagatatggtattccatgtgataatatcagtttaaggaaacatgtatgggtacgtacgtgtaatgcttttgacttagtttcacacttcttcttggtaaacgatgagtatgtacgtgtgtttgtctttggtatatcatgtctgatgtctatattttaatatttaaggttcatgtctatattttaatatgacaaatcttttttttttttttttcaggaagctctattgcagaactacatctacgaggaattgaaaatctgtcagatgaagaaattgcaaaactgattttacttgaagaagctgaaatcttagacacccacatctctcctttgatggaatattatggcaagttcttttgtaaagaaccagtgacacaagatataggtagtggatggcgaatgattcaaaatcaaatctatgacaatgaaatcgcatgtcaaaagctgatacggatgagtacagtagcatttcaacgtttgtgtgaaatattacaagagaggtatagcttacaagacacgcaaaatatgtctgttgatgagagtgttgcgatctttcttatgatttgtgggcagaatgacactcaaggtgacattggtctaagatttggtcatgcacaagaaacaatatgtcggaagtttcatgaagtgtttggagcaatggaatgtatggcggtggactacatacggccaagaactacccaagaacttgaagctatagcaaaccgtctacaaagagataagagatattgtctttactttagtggatttattggagcattagacgggactcgtatacctgttatgatgcctccaggacaagaaaccattcgatttgtgaaccggaaagaaaatgcaagtctcaatctcttggcaatgtgcgacttcgatatgctttttacatattgttttgttggtatggcatcagcacacgatgcacgtgtgttatcaacatcgattcgagatgatcctatgtttcctacgcccgctgaaggtaaatactatcttgtagattctggttatgccaacaaacgtggatatttggctccatatagaaaacaaagtaatactggcacaagatatcatctacaagagtttttcaatggtgaaccgccaaagaatagcaaggagatgtttaacagatgacatgcatcccttcgttcagttattgaacgtacattcggagtttggaaaaaacaatggagggttttaaatgaatttccaagatataatattgcagtacaaagacgtgccatatttgctacaatgggacttcataattttattcggcggaacaacattgaagatgctgactttgaagaagcaaataaagaaagtgaagattcacatgggcaacaaaatgtgagtgatgatgccaatgatgatcaaagtgttggagtggaagaagaaacacaagatgggaattatatgaagatcgtccgtgattaaattgctgagcaaatttggtctgcaagtcgacgtagttctcgtcggcaacattagattttattttaaacaatatttctctacatttaactattcagctaaatggtcaccatttgacatactttttaattctctgcagcttattcatcttattcagctcatttttattattcaacttatttttgttcaacttataattatacatctgattcagttggttcaatttctcaatcaccatttgtagcttatgtttctggagaagccttgcttgagcagatagattattgggattcttaaaaagatatttcatgtggggataattggcacatccccgccaatatgccagattgatatctggttaatcacaattgccacaagaaaaacatttttttgcagcttccttactggaaggatcttctgttgaggcacaaccttgatgtaatgcatatcgaaatgagtttttttgataacatgatgcatacacttttgaatgtgcaggggcgtagtaaagacaacttaaaaacaagactggatttgcctgatatatgttcgcgacctgatttgcatcttacgagagatgggaaggttctcgttccaacttttagattatcctctgaagcaaagacagcgctttttgagtgggttaaatctgatgtcaaattcctagatgattatgtgtctaaactttcaaagaatgttgagcaaggcaaaaagttttcgggtatgaaaaagccatgactgccatgtttttacgcaacgcctattaccatttgctttcaaagagctattaccaaaaaatgttcatgaggcagttgtaggtatgtgtgataatttaattaatttagttagcaatatatgtaattatactcataatctgctattattggaactttcttttgtgatctttgcacacggactcttacggaagacggaatagatcatctagataatagcattgcgatcttattgtgcaacatcgagaaaaatttttctcttttatttttcgatgttatggaacatctacccatccatttaccacatgaagcatcccttnnnnnnnnnnnnnnnnnnnnntggatgtacccatttgagcgattcataaaacatctaaaaagaaaagctaaaaatcttgcaagagttgaaggctcgattattgcagggagtttgaccgaagaaacgtcttatttctcttcctactactttccgcatatagttggaacacggaaaagggccccaagacggtatgatgatggtggtgtggcacctgtatatcctgttacaggtgttcctgatatatttgcacaaattggaagactaagtgaacaagttaaaaaaatttggtggtccgataaagatcgtcaaagtgcccacacgtatatttttctaaattgcgaatatgttcaaccatttgaaaggtatcttttacacaatatatatatatatatatatatattaatttaatatcattgctaactagttcctctctaattgcagtatttcataacacaagtgaaaaaaacattttccgatatatctgagaaagaaatagcgaagctaagagacagggactttgcgggatggttaaaacaatatgtagaataacttaataatccttatatatcaaattattatcattttatcttatatatgtttatctaattagtaatgttgtattttacaggtacattatgggatagagacatcccgtttggtttcacgagttaatccaaggtcctcttgcgagaattactactgcatccatgtatttcactcgtggatatgcttttcatgtgcaagctcactgtcaacatcggacaacaacaaactttggtattttagtacgtggtgaaacagattattacggagtgctgcaagaaatcatagaaatacaatatccaggattggttaatttgaaatgcatattattcaaatgtgagtggtatgatcctgttatcaagcgcggtgtgaggaaacacaatctcggcattgtagatgttaatgactctcagagatatcaaaggtttcaaccatttatccttgctgctcaagctcaacaagtcagtttcattccatatcccaagattcggcaaactgcggtatcttggttatctgtcattgaaattttaccaagaggtcgtattgttggagtctctgatgaagtaccactacaaaacacacaaggagagattcatgttccagaacatacactcgaaagcgtcgtacatcttgatcaagacaatcgacaactagaagaacctagtgattactcagatgaagtcaaatga

SEQ ID NO: 193094 - DNA, 761 bp, Arabidopsis thaliana landsberg
atggataataggcgcaaaacaggtgaataattcatgtttttaaattgaaaaaaatacattgtgtactcaataagagcgcattcatgtacaatgatctcaagaagattggttagtcattttatagagttaagtgatcgcaacgatcattttttacaagtctactattcgtataagtagttataggaatatatgtagtgtacttagaaacatatagtatgcaaatatgtcgaagtggtttaacaaaaattatagaagtcgtaccctccaaagtatcgtaatcgaatatgcctataaatgaaatttgaggacgaaaagaatgaatattgcaaatgggtttggctctatattctatctgttcaaaagtatatctgaaaataaactaaaatgaaaattcgtagctaaaacgacatccctagctagttgtcttgcatgatctatccttggatatgggcttatggacatgttggtttgtttttaaggttaaccctaaattatttgcctcatatattatatagaatcataattatatatgtcttcaagtagttataatgtattgttttattatattgttcttcttaaatgacattgtttcttccgtcggatcggataacacaattatacatatgctcaatacatgtgggagcttcaatttttttgtaacaagttgttagatatgattgtgtgtgtgtgtgtctatatactcagtgaatcatgaatacgaccaaaaaacgacgaatcatgcaaaaagaaatcgttcatga

SEQ ID NO: 193095 - DNA, 306 bp, Arabidopsis thaliana landsberg
gccccagtgatcccatggaacccgaagcacccatcgtgctggtgacgattcccgaagcggtaaccatcccgccagaacttcctccatccacgaactcggagacagtggtcattggaagtattattaactcttaatctcaaagctcaagtatttctttacttgttcgtcaagctccacattttggaagtgaattggcccggggttcctagcgagcagcctactactggcgaatcgggtgagaataagacagttgccgtagatcctgaaccagctcaacccgaactcgaggtgcccgagaacttgtag

SEQ ID NO: 193096 - DNA, 207 bp, Arabidopsis thaliana landsberg
atgaacaacagcggcaccagcaacagctaccagatttccggcctcagcagcggcgaggtggtgagctactggttcaccatcggccagagcgatggctcggcggtgaatacgccgacacagacactgagttacgccgcaccggcacccgcgccgacgccgactccttcgcccacgccttcaccctcgccgagcccggtgtttccgtcg

SEQ ID NO: 193097 - DNA, 367 bp, Arabidopsis thaliana landsberg
atggccgcatcaccgcaacctccaaacgagcctcgttgcgcggagtcgcgccgcggaggagaagatagtagcaacgccggggaagatgaccagcacatcgccgtagccaccctccagctagcggcggacgccatggggcctcggctgcaacgacttggagaagttgggctgcatggaggactccgccggagagtatgaccctgctgcggtgagtggagtcgcttgacggcagtggcggcgagaagtccggcagcggcgcgtggagtcgcttgacgacggtggtggcaagaagtccggcagcagcgctgtggatctcggccacagaagagaaaaacaaaagacaaaaattgcatcgtcgaatacatga

SEQ ID NO: 193098 - DNA, 267 bp, Arabidopsis thaliana landsberg
atgcgcggcgcctcggcggcccgcacgggcaacgccagacacagcagcagaccaagcatgcggacgcaatgcatcaggtatcccatttcgtcagaacagcggcgcggctgcaaggcgggggcattgcggtcgctcgcattcatcgaacaagtgtagtccggttcgaccgctgccgtctccgtttatcgcggttgcattcctcccagcgggatcggaatcgaaaatgtgagcttggtgccggagcctggcgtgctatggatatggaag

SEQ ID NO: 193099 - DNA, 418 bp, Arabidopsis thaliana landsberg
atggcttccaaaatctgggaaagaaccggagaatggaaatacctggacatgatcaacaaggaaatcatcccgatgcgtcttccttcgagtgataaggcgcaattctatccttattgcagaagtataaattccctgtctaaagatgagtctcagctcgacgtagtgaagaaacacctgaagcataccaaaatagtgggttcacgcctgatagataaggtgacgaaagaaaaaacggagattccggaagtggaatacaatgtggaatcgtatcctccggatacgtatgcgatcctggatacgattgaagtggaaaatccggaactaaccgacgtgagtatccgccaattcctgttcacagctccaaaagtaactcttgtattccccaggaacctgaaagaatttgatatgaatcataaaa

SEQ ID NO: 193100 - DNA, 230 bp, Arabidopsis thaliana landsberg
gattccagggaaaccggatcatttccgagaatcacagaaatgatatggaagaatcttcaaggattatatcaaatcagaaaatcttctcgaagtccctgaagaataaggaatatttccttaaggcagaaaggttctggaaccgacttaaggatatattcaaatcttccgagaatattgctggagaggcaatttatcaagtctatatgaagcgactcaagaacttcgcataa

SEQ ID NO: 193101 - DNA, 358 bp, Arabidopsis thaliana landsberg
catcatcagctatatttttatcgagttcctgtcgctgcctgtacgcaatgccgtggtgtatgccgttccgctgggggtcatcagcagttccattgccattcccagtgtcaccaagctctccgaggcgcaaagggagttcattatctacgaaagtactttttccgacatcctcggcatcatggcctttaattacgtggagctggagaatgtgctgagcggtgctgccgtgctgggctttttcatcgatctattcatgatcattggggtatcgttcctgagcacggcctttttgctggtggtgctgaattataccacttcacatgtcaagttttacctcatttttgcagtgctcatcctg

SEQ ID NO: 193102 - DNA, 909 bp, Arabidopsis thaliana landsberg
atggggagaacttgttggcttcgtctgatttctatggtgttgtcattgtatggaaaagagcaaagacaagctcataaggtttgtctataatattataaatgaatctaaatccgtcatttttgccacaaaggctttgggtttggcatcatctctgtatcgctaatctcaaaactgtgtcaatttagtttcccatctcttataaagatatagttctgtgacactcctatgcacagattcaatagcttaaatggttggaacagacacgtccttaatgagttaataactctttccatagataagttggtagacaatttgaagagatcaagttaattgtactcgcaatgttttttgttttgtcacattatcatgaaccagattaattatcagtaaaattaatgaagattacataaacaacattccattgtagtctagttggtcaagatactcagctctcacccaagagacccaggttcaacaagttccggcaagctggttcatctaattcttcaggggaccaaatggaatatgatacttggttctcttagagaaatgtggctctaggattatattgaattcaaattatgtaactgatgagcatttggtgcttatattagtgtggaagtggttggactagataatcatgctaataattaaacgtatttcaaccagcaaaaagaatccgagtgttttgtgtattaattcttttactaaaagcaatagaatctcaacttcaacgtaagtagggcactaataaaaacttaacatttacaattctcttatttcccaagcaaatatcttcggcgtcatgttcatattggattaataataataagaagaagggttggttggtcgtcgtatattatgaagacactcttccctatccactgactctatctgtccattgtccag

SEQ ID NO: 193103 - DNA, 617 bp, Arabidopsis thaliana landsberg
actttcaccagcgcggaatctcgctatccgcaaatggaaaaacttgctttagcagtcataatgtcggctcggaagctgcgaccctactttcaatcccattccatcatagtaatgggatccatgccacttcgcgccatcttacacagtccgagccaatcaggacgcctggctaagtgggcaattgagctcagcgaatacgacatcgagtatcggaacaaaacatgtgcaaaatcccaggtcctagccgattttatcatcgaactgcccaccaaggaggcccgggagaacccactcgatacaacttggctactgcacgtagatggctcgtcctcgaagcaaggatcaggtgtaggcatccgcctcacctcaccaacaggagaggtcctcgagcagtcatttagattaaactttgaggctaccaacaatgtggccaagtacaaatcgctcgttgccggacttaatctagctcggggactaaagataggaaaaatccgagctttttgcgactcccagctcgtcgcgaatcaattcaacggagaatacacagctcgggacgaaaagatggaagcctacctgattcatgttcaaaatctagcgaagaatttcgatgaattcga

SEQ ID NO: 193104 - DNA, 100 bp, Arabidopsis thaliana landsberg
aaccttccgaaaccaaaaagtcaacattcgggcagaatcttcagaactttccgcaaccaagcaatcaacgtatgagacaacctccgaaccctccgcataa

SEQ ID NO: 193105 - DNA, 114 bp, Arabidopsis thaliana landsberg
ttgctacacaacagcaagacctgaaaaatctattgcaggcttgcagccccgagaagaacgtgtaattgcgcgtctagggagattctcaatactccatgaagttgagcgtaagcc

SEQ ID NO: 193106 - DNA, 533 bp, Arabidopsis thaliana landsberg
gccacaactacactgtcctctatatagacaacaacaacaattccgtcactcttggactttcaagacaagatttctcaggtcctttctgctctgcttcattctcctccacacttttatcttcaggtctcttccagaatttaccatcttacaaaagcctcactgtgttctacgcttgtgaccctcgtcgccatttctttgggaatttcacatgtccagtgaaaggtcttggctctattattcaaaactctacatatggtatactttgtgatgggagtttcagtgttccagttcctacgagttatgttccagaggaagaagctctgaatttgacacatttggaaagtgttttcaggaaagggttagaggtgaagctgaagataagtgagatgtctggtcaagaatgtgtaaccactgatggaaactctggcttcacacggttttgctgcacgaacgtatcaggaccagaaatcagttgccttacttcaataactactatgaataatggttatcacttgatcttgaatttcatctaa

SEQ ID NO: 193107 - DNA, 84 bp, Arabidopsis thaliana landsberg
atgagctacattgcatttacagatgtgatcaagatcttcgtagctttatgttcttgtcctcgtcttctctatgtagctcttcag

SEQ ID NO: 193108 - DNA, 196 bp, Arabidopsis thaliana landsberg
atgcatgcaattgcagacagaggtaagaaccctaaaatcccagaagataaaaagtttcaaactttttgcaaaccttcagggagattagttaaatcctcgaacttgacatgcaaatcgatttcagaagaaacccgacattcactttatcgatcaggattaaatcaaaaatcgcatctttttaggtgtacccctgcag

SEQ ID NO: 193109 - DNA, 799 bp, Arabidopsis thaliana landsberg
atggatatgtttcggatgttaatacgtcttggagaagcgatgaagcttctctccagtagctgtgttcttgctcttaactggctagaagatacgatcgagtacctaaccgaaaagggaatgcctgaagatcatccttgcggtttgcggttcaagacttccatagagcttctccgggaattgcaaacgaccgagtctcgtgcttatctcaaaggaggtattctttacacagcgctgaagaatcttgaaacagaattcaagcggattctccaagagaagccggttttctcagaagacaacttgagaaagttgcaggctatcatcaagagattacatgctcacacgcggttaacaagctgcgtaccagtttacatcaaagtccgcaccaaggtcattcagaaacggtttgagattagttatctggagaaaacaatcacagaagctgataatgtacatgatattgaaggcgatatagatcaatggagattgcatatggagatagctgtgaaagagatatacgagtttgagagtaagctctgctatgacgtatttgaagatattggagaagatgttcccttgcgttgctttggagaaatagcttcaaattcagtgatccttcagcttctcagatttggatcaagaatcagcaaatgcaagagagagccaccaaagctgatcaagctcttagattgtttctctacaatggacaactttcggatagagtttaacaggctatttcgaggggaacaatgttcagagatacgcagagttacacggaaactaatcaacaatctcgttaagg

SEQ ID NO: 193110 - DNA, 1463 bp, Arabidopsis thaliana landsberg
atgttgtggcaaacgtttttttcctctcttctcttactatctctgcttttcggatgtaacggagatgaatctttacctgaagtaactgattctgaagaagctccaatggacaaaagagaacgtgaagccttgtactctgcgattcaaggatttgttggtgattcttggaacggatctgctctctatcctgatccttgtggttggactccaattcaggtttttcttacaagtctctctttccttaaaaacttgctttatagtttctctagagttatgttttgtacggtcaagtaagtccttaattgtcatagactcttgaagatagtgaagagcttgagcttataatgatgtagaaacttttgagctttagatgttgttgaatcaatcaaacttaacttcgaaaaagcctttgaaatgatgtgtaaagacttttttgttttctagctgtctcaaataattcttcaaaatgctttgtcctctttgaaaatttccataatcggatagtgaagtttaaagcttcaaagcaacaaagtgaatcctattttcatataacatctctttttgggggtttctttaaatgtttcaatggttgttacaattatatgctcattggcccaccaatcattcctttatcttgcagctaagtgctctccagaaaatccaaacattgaaaaataaaacttttttgtttttggtttcagggtgtttcttgtgacatctacaatgacctgtggtatgtcacggatttgagtttagggcttatttataaaactcgcttccttgctcctcaagtcttcagataagaccagagttatttgagctcgagcatttaagatctctctccttcttcaactgctttatctctcccatggtgatagctaaagaggagttgtggacaaactttgcatctaacttagaatctctcgagtttagatccaatcccggtctcattggggaacttcctgaaacaattggaaatctcacaaagctgaagtctttagtggttctcgaaaatggatttagtggagagctacccgcgagtatctgcaacttaaagagactaaagaggctggttttcgcagggaactcgtttgcgggaatgatcccaaactgtttcaaagggttaaaagagctcttgatcttggatttgagccgcaactctttctcagggacattgcctacatcttttggagatttggtttcattgctcaagcttgacctaagcaataacctcttagaagggaacttacctcaagaactaggatttttgaagaatttgacacttttggacctgaggaacaacagattctctggtgggctgtccaagaatattgaaaatatccaatctctaacggaattagttttatctaacaatccaatgggtgaagaggatatggtgggaacaaattgggggaagatgagcaatttggtagttttggacttatccaaaatgggtttgagag

SEQ ID NO: 193111 - DNA, 461 bp, Arabidopsis thaliana landsberg
  unsure (1)..(461): unsure at all n locations
atgtcggtgtgtatatggccaggagtgatggagttgacgcgaacctggtcaggtttaaactctcgggccatggccttacccagacctaacacgccggctttggcagcactgtagtgggggcccccaaagataccaccgccacgttgggcggaaaccgacgacatacatacaatgctgcctgcggattgggctcgcatcgtcgggattacggcttgcgacatgaggagggtgccacgcaggctgacgtctagcaccttgtcgtaatcggannnnnnnnnnnnnnnnnnnnngattggctgggtgatacccgcgttattgaccagaacgtcgatacgtccaaagtgttcaagaactttagccaccgcggatttcacttgcgcttcatcagcgacgttggctcccagccccagatggccctcacccagagtttccgcagcatcacgtgccgaggactcatctag

SEQ ID NO: 193112 - DNA, 763 bp, Arabidopsis thaliana landsberg
cctgaggggagactggaattccttccaagactatggctccttccgggagttcccaagccttcttctctcctctgatagagaccgggtgaccttcaagaatctgggggtcttcagctctcctgggttgaactgggttggatggagcgggctcttggatccgcagggctctacgttggttatgggttaccaagtaggcctccatcaacttctggacgtgctcatccttggcttgcttcagggcttcaacagcaatgacttcacgactttccaaggcagctacacgggcttgagctgtggtgagatccacatggagctgacggatgcgcttctctgcatcttctgctcgggcaatcatctgacggtggtgccgagccaagaaatcatactgtgcatccagggtgagcaggtatgcagtgaggtacacgactgtggggtcatcctcaagcagctgcttcccttccaatgcacgcatcctggccatccaaattggacggtctctctgaaagggcagaaagaatctgagcggggtgtcggccacttcttcttcatagatctgacacagggccctcaatgccttgcgggcgacgacttggcaggtgtctttgaatctgtgcccagcagcagtgacactccattccacatggtgcggactggatccaatgtatacagtcacgacacacttctctgtgccatgctcgacgaattcacgaccatcatactctggctggctcctgattccgaggcggactgtgcatgctcttag

SEQ ID NO: 193113 - DNA, 39 bp, Arabidopsis thaliana landsberg
gtatgccctatgacctttatatcattctctatgactcct

SEQ ID NO: 193114 - DNA, 274 bp, Arabidopsis thaliana landsberg
gttattcgagaatcattcaaaggtgagcgccatttgttatattttacttctctggtgaaagtaattgaatacataccattttaaatagttagcagtcactttatcgtgacaatggatcaaaatggttctgtttataataaatatatatgcttatcgctgcctactttctgaccttgttgaaactcttgttgaaatgtgtgatacaggtttcgcaaactttgttgacaataaccgtaaactcttttcgaaaatcaacgcaatctgcctcagtttg

SEQ ID NO: 193115 - DNA, 189 bp, Arabidopsis thaliana landsberg
gctaatgatagacgaatgcataggattctctcattgccatcgtgctcagactgcaagggcgccaaccgctaccttttggacccttcatctatcttcgcacgaatgaacagttttcagatcgatcttcggccagacccggagccaagttatattatccgcaaatgtaacaattggctcgcttatcattaa

SEQ ID NO: 193116 - DNA, 810 bp, Arabidopsis thaliana landsberg
gaaaaggctcagaggatttcagaggtagcgatagcacttaaggatgaagcagccagtgcgtggaacgatgtaaaccaaacacttaatgtggttcaagaggctgttgatgaagagtctgttgctaaagaagctgttcagaaggctactatggcattatctctggctgaagcaaggctgcaagttgcactggaatcactagaagcagaagggtacaatacttctgaagagagtgaggttagagatggtgttaaagataaagaggaagcccttttatctgctaaggctgacataaaagaatgccaagaaaatttagcaagctgtgaggaacaactcatgcgtttgcaagttaagaaggacgcgctgcagaaggaagtagatagattgaatgaggctgccgagagagcgcagatcagcgcattgaaagccgaggaggatgttgcaaatatcatggttttggccgaacaagctgtggcatttgagcttgaggctactcaacgtgtgaatgatgcagagattgctttgcaaagagcagagaagactctttttggttcccaaacccaagaaacaacccagggaaaggtattggatggaaagaatactattgttggtgaggatgaagtcttgagtgaaattgttgatgtaagccatcaggctgaaagagacttagtagtagttggagtttcatcagatgttgggactcagtcttacgagtcagataatgagaacggaaagccaactgcagattttgctaaagaggctgaaggagaagcagagaagtcaaagaatgttgttctgacaaaaaaacaggaa

SEQ ID NO: 193117 - DNA, 727 bp, Arabidopsis thaliana landsberg
caacttttcagccacagaatctctcactatctcaagcaacaaaaccattatatctcctagtcaaatcttcgagctcggtttcttcaatcccgcatcaagttcgcgttggtatctcggcatatggtacaagataatccctataagaacctacgtatgggttgcaaacagagacaatcctctctctagctccaacggaactctcaaaatatccggcaataacctcgtcattttcgatcagtccgataggcctgtttggtcgacgaatataaccggaggagatgtgagatcaccagtggctgcagagcttcttgataacggtaatttcttgctcagagactccaataacagacttctatggcagagtttcgattttccgacagatactttacttgcggagatgaaattgggatgggatcagaaaaccggattcaacaggatcttgagatcctggaaaacaacagatgatccatcaagcggtgagttttcgacaaaactcgaaaccagcgagttccctgagttttacatatgcagcaaggagtcgatactataccgcagcggtccatggaatggaatgcgttttagcagcgtaccagggataaatcaagttgattacatggtttacaatttcacagcaagtaaggaggaagtgacttactcataccgaatcaacaaaacgaacttatactcgagattataccccaactctgcgggtttattacaacgatag

SEQ ID NO: 193118 - DNA, 109 bp, Arabidopsis thaliana landsberg
atgaaagttgaagtttcccgagttcttctgcgaactgccggcgattctgtgattgaaactggagctgataagcccgccgaatatatcgatcctttgagcgtggcaaaag

SEQ ID NO: 193119 - DNA, 793 bp, Arabidopsis thaliana landsberg
atggaagagtttcaaggtccagaaccacgcggccaaatgatgagcgagaatcctcgatccttggagctcaatcaacgcaaatggtggatctctgttttcttctgcggtttcttgatccttgccggagactctcttgtcatgcttctgttgaacttcttctacgtccaagataatcgatcagagagtgatcaagaccgacaatacaaagggacatggacacaagctctgatccaaaacgctgcctttccgatcttaattccattcttcttcattctttcttcaccaaaaccaaacccggaaacagtctccaatcaaacaaacaatggctggtttcgagttctctcgctctacgtttctcttggtgttcttgtctctgtttatagcaagttatacgcgctggggaaattatacgtaggatggggaattttgttatcaactcaattgatactcacctccctcttctcagctttcataaaccgtctcaagtttaacagatggatcatcatatcgataatcttcactcttggggctgacttttttggtggccctgcctttgctggaacccctaatgaagatgaaactgatccttacgacatcaaggcatggttgatactcatattccctactcttgctttctccttgtctctgtgcttaatgcagctcggattcgacaaagtgttggtgaagacaaagaggtatggtaacaagaaggtctttcggatggtcttggagatgcaaatctgtgtttccttcatcgccacactcatttgcactgtgggtctgtttgcgagtg

SEQ ID NO: 193120 - DNA, 122 bp, Arabidopsis thaliana landsberg
cggaggaaggcccatatagaaaagaggcccaaacttcaaaggggaataagaaaatgtggatgagcagcgtagtcaacgaaggtgtagagaggaacaagtgtgtatcttccataatcaactaa

SEQ ID NO: 193121 - DNA, 345 bp, Arabidopsis thaliana landsberg
  unsure (1)..(345): unsure at all n locations
atgtccgtcagcgagcgaaagcacgttggcggcgccctgttgctgacgagcaccagcagcatgctcttggggccggggccggccccggccagagccggttgctcttaggggccccggagagcgttgttgatgggtcttcatgggacgttgcgggctgctggggtgagcacggtctcacaccatgtgtggaagttggtgggtgtgggggnnnnnnnnnnnnnnnnnnnnnnnnnnatcccgttctgttgggcccagtacatcgccgtgaagtcgcgtgccatcccttcggggacgccgcgctggatcgtggacgctgtttggtgctcgaggtcggcctgttcgcag

SEQ ID NO: 193122 - DNA, 76 bp, Arabidopsis thaliana landsberg
atggaggcttggcataaacacatgcaaccctcttttattcaacgtccatggattgatgatgccataaacgccacag

SEQ ID NO: 193123 - DNA, 319 bp, Arabidopsis thaliana landsberg
gccgtggcacggatgacatcggccgcacgccaggccatcgccatcgtcggaccattggtgttgccggacggaatctgtggcatgaccgaggtatccatcacgcgcagaccttcgacaccgcgcacacgcagttgtggatcgacgaccgagcgctcgtctttgcccatgcgacagctgccgacggcgtgatagccgcagctgccctgacggtcataggccgcaatgatgtcggtatcgctttcgcaggccgggcccggataggtttcgacgtcgatgagctcgcgcaatgccggttgcgcggcatatacaccggcgctgc

SEQ ID NO: 193124 - DNA, 146 bp, Arabidopsis thaliana landsberg
gagatttggaacacctgtccagccattccctttttcaagaatctccaatacctgtttttttcgctttgaaatattcgggtgtgagcttttgctgtcgttgtaattttcttctgcggttattgcaaacggttcttttggaaatttaa

SEQ ID NO: 193125 - DNA, 474 bp, Arabidopsis thaliana landsberg
  unsure (1)..(474): unsure at all n locations
gtacttaccgggcggataccttcggtatgaatggtgagatgaccatcctcggaagtggttaccgttgcgcccagtttccggatcacgtctatggnnnnnnnnnnnnnnnnnnttttgccggggttgatcaatactgtatcacctcctgccagcagggccgctgcacatgcgcgctgcatgctgctctttcctgccgctgccgtaaccgtgcccgaaagccgtgaaggctgtatccttgcgatcatccttgtttaaatagtttcttttgctaaaaggttctccagccggtcaaagggcagcaactgcattacgccctttcctattttttccagcaggatataatggatgctgtctttgttctttttcttatcctgccgcagcactgcaaacgcttctttcctgtcaaaatcatattgcacgggcaggccgtaacgttgcagcaacgcttttacctgctgcgcctggcggaagccg

SEQ ID NO: 193126 - DNA, 226 bp, Arabidopsis thaliana landsberg
cttatgtggagaagaaggtcataacaaactcaaatgcaagactgtactgaagcctaagccaccaaagaaaccaccaagtaggccacgaaagcgaccatttgcctcgatttctgaagctgaaccaagcctacctagccttccaagccttccaaacgaagttgaagatcttccaagcctgtcatctgcacttcctaggaaaggtcatggaagacctcgtaaaagttag

SEQ ID NO: 193127 - DNA, 497 bp, Arabidopsis thaliana landsberg
atgaccaagcttttaaagctccaagagaagattcaagaaagactcgcagtcactcccactctctcaccagtgtcttctccttcttctcactctcccaaaatggtaaagtcctcttgttcagtttctaatgtattacaggcacgtgtgtgtgatttgtgagcgtgtgtgagtttggtttgtgcaggttgggaaggtgatatacccgattggttacggagctgaccctacagggggacaagacagtagtgacgcaatacttgaagctttaactgatgcttttcagttacaaactggacttgagatgctgccacgtgttgctgatctaggaggtctagttattgatctccaaggtggcagttacatgatcggaaaacctctcaggttcccttcctccggcgggggaaaccttgtggtcagtccctcccttatattaaatttgaaattcttgtttttaagtttgaatctttacacattgtttggtgtaaatcaggtgaaag

SEQ ID NO: 193128 - DNA, 72 bp, Arabidopsis thaliana landsberg
ttgggaatccgaatctctccatatgtttccatgcactttagaagaaataacaacaacttttccacaggttaa

SEQ ID NO: 193129 - DNA, 213 bp, Arabidopsis thaliana landsberg
atgcatactggacaaacaatggcaagaaaaaagtacactagagataggtatacactactattaccatttgtaacctccaacgacaaatacatcggagtaatggcttcctgggtgttttgcctagagaaattagggatagtccacgtgaatttcagagtaggaggatcctcagctgactggttcttcacagtactcgcaacagcttcggtttgg

SEQ ID NO: 193130 - DNA, 347 bp, Arabidopsis thaliana landsberg
ttataatcagagtcatgataagagttacggtgtcgcggtcaaacacagttgcgtcttactgtctggtggcactgctgatcctaacacttgcgggatcggttaaaaacagcaacggaggaggtagcggagaatattatcgaggaagaaactgtgaggtttggagagggaagcaaatgatggagaggccatgtgaggagctatacgtagtaggtgaaggagacacgcttcacagcatcagcgaaaaatgcggcgacccgtttatcgtggagcgtaacccgcatatccatgacccggatgatgtcttccctggtctcctcatcaaacttcacattaacctccctgaataa

SEQ ID NO: 193131 - DNA, 202 bp, Arabidopsis thaliana landsberg
atggacgaagatgcagatggcagcgttgctgcctccgaagcttccatgcttcccgactctctggctcacgaggagaagctcggcatcgagccgcagcttaaggagaaggtcacaaatgagtccaacggtttaccaagaagcaaacgctcggttaaaacagtcatccttccggcgccggcatctcacgccctcctgtacgacc

SEQ ID NO: 193132 - DNA, 48 bp, Arabidopsis thaliana landsberg
atgagccggacgatgttccaatccacgcacctgtgtgggggcgacttg

SEQ ID NO: 193133 - DNA, 320 bp, Arabidopsis thaliana landsberg
agccggaccatccttataaaaaccgtgacgagctcttcaagccacgtggtgctggtaaccaaacagcaggcggtgtgaagtacaaaggggactggatgacccgtccggtgtcagaagacgaggttgcattgatggctaaactgctaatcaacatgtctatttggctcaatgaacgcctcgggctgaacaaatctgagacgagcaacgacaagaaagagaattcagagtcagtatcatatgtagatgtatcaggggaagatgtgggaaacgttgcaggacctggagatgctgcgaagatgctgttgcgagggatggtgatg

SEQ ID NO: 193134 - DNA, 225 bp, Arabidopsis thaliana landsberg
gggaaagagttgcgggctggatctaaaacgttcatggtgtttggaaccggacttagacaatgcgctggtgcagagtttgctaggcttcagatttcagtatttcttcatcatcttgttaccacttataatttctcgttgcaccaagactgcgaggtgcttcgtgtaccagctgctcacctccataatggcatatctccaaacatctccaagtgtcccaaagaatga

SEQ ID NO: 193135 - DNA, 99 bp, Arabidopsis thaliana landsberg
ccgcatcatccttctcccttgtgcgatatcgtttgcgtgaggttagcttttcatacgattcttcgatttgaattcttattcttccgatcgatttggtag

SEQ ID NO: 193136 - DNA, 317 bp, Arabidopsis thaliana landsberg
atgatgatgaggaaaccggacattactacgatcagagacaaaggcaagccaaatcatgcatgtggtggtaataacaacaaaccgaagctaagaaaaggactttggtcgcctgatgaagatgagaagctgataagatacatgttgactaatggacaaggatgttggagtgacatcgctagaaatgctggtcttttacgttgtggtaaaagttgtcgccttcgctggatcaattacttgaggcctgatcttaaacgtggatccttctctcctcagaaggaggatctcatcttccatttgcattccaatcaaaaaaacag

SEQ ID NO: 193137 - DNA, 166 bp, Arabidopsis thaliana landsberg
ggaattagttagtcgatttctcaggtcactgggaaaatcaaaatactcgtcggaggagttttggaaattggatttatacaagtgggagttgggagatgagggcgggatcaacaggacgattgtgagagaaagagattctgagttcttggtgacgggttcgatctga

SEQ ID NO: 193138 - DNA, 776 bp, Arabidopsis thaliana landsberg
atgtcgtcggtccgcgtgcgagatatgcagcggctgggttactttggcgacggacttgcgctgtcccggggacggaggaagtccccgagccggaacgacgttggttgtgttcgaggcgttcttcgcgccggtcgtccgctgcctgcgcaccgatttgttggagaagtctgcgcagatttacattcagatcatcagctgacccgaatgtcgtgtggctcttgcgaagtatgtctgggcgtgacttcgtatgtggtcagccctccgtagacgtcttcgccaagaattattgtctgcactggcagaagagaaaaattagaagcaagattgcacagtttggatcatgcacctttacgccgaggactgggaagacttcggcggaagttgtggagctagttccctgtgcccgtaacaagtggggcaactggtatgattattggttttatgtgcgtggaggcgaagtcgaagacctcccaggactcccggcggccgtgatgtgctcccactgttatgtggcgttcccaccgtttgaggtggcggaggatgatagggacgaaggggcccttcgttgtgttgcccgcataagtagcgggcgcgatttagttgacgaattcatcggttatggagtgtggcccttggcgcatggttgggcgctgggcgaagtatgcccttgccagatgccctccctgggtgagcagcaagtgcggagtccggccttcgcgttggatctgtgcggccgggatccagccgcattcgtgcgtgaagtggaggacggagtt

SEQ ID NO: 193139 - DNA, 216 bp, Arabidopsis thaliana landsberg
ttctttgcatgtgttcaccaatcgcccttgacagccaaaagctccccgcaaattctacacaagaagggtgataaggttcatcagacgtatgtgagaaaacggattcagctttctttagaggaagcgaaggactacgtgaatgatttcgtggcagagaagaaaagcaaagtcaaagaagagaagcacgattcaattatattaaatttcaaggactaa

SEQ ID NO: 193140 - DNA, 244 bp, Arabidopsis thaliana landsberg
atgggaagaataatttctcacatccaatgtgtgatggctgctatagttatgagacaaggtacgaaatttatttttttggtctcaagattttttccgatcaattttgcagtcaccctcttagcaaacttagaatctttcttgatctcttagaatcatggagactaataaagctacttattccttctttttttcaaaagttcttacacagaccgtaaaagaagggaatgcatcaacgaccttttag

SEQ ID NO: 193141 - DNA, 107 bp, Arabidopsis thaliana landsberg
ttcttgcattgcttctggaacctcaggcccggtttgctggaactcgggatccattgatactcgctgaccgagcttctattcccaaattcttcaagaagaagaagtaa

SEQ ID NO: 193142 - DNA, 352 bp, Arabidopsis thaliana landsberg
tttggaacttggcctatatttgaaggttgaagtgaaacccatagttggtgttaattctcatgaatatgaccacttggtttcaaaaaagaatcttaaagacaagaatctgttacatgtttttgatcttgtcattaaagggtatataatgagcaaaaatgactggagacagggatggattgaagtggaacaattacatcaaagtagaattgattatgtaatgaaacatgcaattgaaacacttgtgtatcgcagtagaaaaaggaaatcaatgtcctttagtgagaaaataggacttgtctatgaaaactgtgaagatcttaggtacaaagtggaaggatggaggactatttag

SEQ ID NO: 193143 - DNA, 105 bp, Arabidopsis thaliana landsberg
atggtgattctaggcatccaactcaatgcagtttctgttgtgaatttgataatgtcaatcgggattgctgtagaattctgcgtgcacatatcacatgctttcctg

SEQ ID NO: 193144 - DNA, 59 bp, Arabidopsis thaliana landsberg
atgccggcgcggcgcgtctcgatggcggcgccggtgaaacccatccccatgtccgcatg

SEQ ID NO: 193145 - DNA, 357 bp, Arabidopsis thaliana landsberg
gagaaaattccggtggacgaagtgttccaacagctgaaatgttcccgggaaggtttgtcttcagaggaaggaagaaacagactacaaatatttggggcaaacaaactagaagagaaagttgagaacaagtttctaaagttcttagggtttatgtggaaccctctttcatgggtgatggaagctgccgcaatcatggccattgtgttggcaaatggcggtgggaggccaccggattggcaagactttgttggaatcacatgtttgctcatcattaactcgaccatcagtttcatcgaggagaacaatgccggtaatgcagctgcagctctcatggccaatcttgcaccaaagacaaag

SEQ ID NO: 193146 - DNA, 192 bp, Arabidopsis thaliana landsberg
atggcggatgaagcggctgaacaagaattgggcggagcggctgaagcggatggaatgacgccgaagaagagtggttcgccaagggatagtgtggagcacgacaaagctccatctattattgggagagagttctggtctcaattagaccggatgccaacctatataacaacgatgcgcattgcacgattagtg

SEQ ID NO: 193147 - DNA, 77 bp, Arabidopsis thaliana landsberg
agcgattgaatggtttggcgctgatatctatagaacatgaactggttgataaactcgattataaaaaaattgcatga

SEQ ID NO: 193148 - DNA, 199 bp, Arabidopsis thaliana landsberg
cctcctttgccgagtgcctacgagagctctcggcacagggactggcggtggggcgcactggagccgtctttgccgagggccgtgatagcagacactcggcaaaggatctgtcaccgtcacttggcgccgtgacggtgacttttctttgccgagtgtcaaatggcactcggcaaattctttgtcgagtgcccgacaaaaa

SEQ ID NO: 193149 - DNA, 427 bp, Arabidopsis thaliana landsberg
ctggtccagttcctccggccccgggcaatcgtaataggccccgcgcgcggcgaaggtgcggaggaattcggactggaattgcggcgcggaaggcatgataagactctggaaaacaaggcaaccggcaatagcacagtggatggggttcacaaagtcatcggcctgatgagcgggacctcgctggacgggatcgatgccgccctgatcgagaccgatggagaggccatcgtccggcccggtccggcgctcaccattccgtatggcgcccagacgcgggccctgctgcgcgccgccatcgacgatgcgcctgccgccgccggcgtcaattttgaaggtggcgggcagctgccgcacagcatccgcgaggccgaaagcctgtcgtccgaagcccatgcccgggcggtgaaggcgctgctggaaaaggccg

SEQ ID NO: 193150 - DNA, 21 bp, Arabidopsis thaliana landsberg
atgaccacggggtggcgagcg

SEQ ID NO: 193151 - DNA, 217 bp, Arabidopsis thaliana landsberg
ccagatccaaaaaagactgatctattgagcccttacatcggcttgaagatgcgatatgagaaaggtatagacggcgcacgcatacttaatgatttcgttgattacgttgttgagcgtgagcgagttcagttgtctcatgatctccaggttatcctcgccaaccgcctcgctgagattgattcaaaactgagcgttgcggaatcagaatatcaagctg

SEQ ID NO: 193152 - DNA, 314 bp, Arabidopsis thaliana landsberg
gctgagaacgccggcctcgggctgtttgagccccagcggatcgaggagctcgccgaagcggccgacggcgagggtgccgagctggctgaagaggtacgccgatccacggggtggtcgtgctgcgcttacgagatcagatgaccggattgacagaatcgttcataggagtaatcgttacagtcatgaatgaactcgacaagtcacgacacgaccgactcaagatcggctctctcgcaatgatcagctacatcttcaaggccgccatactggcagatcaacctaacgatgatgagcagcgacgcgctctacttcac

SEQ ID NO: 193153 - DNA, 80 bp, Arabidopsis thaliana landsberg
tgtataacgaatactttgattattttaagtactggcgtttagcgcgaatcgatcgctgtagcaataatggcgatgtgtga

SEQ ID NO: 193154 - DNA, 57 bp, Arabidopsis thaliana landsberg
caagcaaccgtcaacaattatgtcgagcatgtgtgtaatgcaaatgaccaaacatga

SEQ ID NO: 193155 - DNA, 398 bp, Arabidopsis thaliana landsberg
atggttctattccgttgcattgctgctccgctctacaatgtattttacttgctaacatccggctgtcatccggctgggtctccaatggatcgaaatcatcgcttaagtctctccactactctgttttttcccgagcctgaacgttaccgtcgcttagttggtcgtctaatttatcttgctgccactcgacctgatcttacatatatgcagtacacatttttctcaatatatgaattcacctcgtgaagatcattggactgctgctcgcaaagtagttcgatatttgaaaggaactcttggtcaaggaatactcctcgatgcgacatctcttcttcatatcactggttggtgtgattctgactatgcgtcttgtcctttaacaagacggtctcttaccg

SEQ ID NO: 193156 - DNA, 1402 bp, Arabidopsis thaliana landsberg
atgtcaccttacttgaattttggtcgtaaaattaatcagaaacttgtatggttccgatttggctgtataggtgtttgcgggattttgcggccatgtcatggaggtgcttgtggtggaagtagctctgtcccaagcttggcgtgtgttgtgcgtgtgttggcacacgcttcggataaggataggaccacgagtggatagagatgagtttagagaaggataagcttgaaatcagataaggataaggttttggataatgtttatccaccacctcgtgcttccgttgcttgctccccacgttttcccacccgtataaattgcccatctcgccatttgctctctaaaccacgaaaaaatcacatttagactagttaggtcgtaaagcttcttggagaagccgtggtcgtcaggagcattggtcaggtagtcgagagtcgagttactcgggtaataggtaagtagttccgcccttagtcttttattctttttagaatatttttctaagttttattttcggtccgcggcttagatccatcgttagtacgcattggagaaagcttaagtcggatcgagatataggcggtcaagggtagaattttcctggtcatccaagccaaggtgagtctaggttatgtgtgttgcatgtgtttacatgtagttcatagaactcgtgtgaaccagattgattgttgtttgtttactttccgttcatagatctagaattgttgattgattaggttgcatagtttagcttttagattggttctattagctaagtgtagaatataggaatagatctatgaaggattgcttttagttttaactacttgcttaagtagttatacaatgttgtgagagacgcctaggaggttgcattgtgtccgtgtggagcaaatgctaaactattttggtaaaggttatgattgcaaggttaccaggggatgccggcaagttataatcgtttcatttctaggcgttagatgtgaggttggctagacgttagtgttaacgttatgctctagatgacctcgcaacgattgattgcttgttattagtcgggtagtcaataagtggttagttattgacatgatagagtagtattgattgatcgcttgttagttatcattgattgattgttgtttgattgtttgatagttgtttgttaatctcgcatttgcttggttaacttgtttgtaattagctttgcatgctaggtagtaattgagaggttaggttgtgaggtagatcttgttacgagtgttatagagattcaataggctcgtagtaagtaaacgtgattagtccctttcccgactagttttgaagcgatgtcgtgattgtcccaatagctcggactggctcgttaccaatcgaggctacccgacggggcagtacaaattatacc

SEQ ID NO: 193157 - DNA, 6549 bp, Arabidopsis thaliana landsberg
atgcgctatcaaatgatgaaatgcatctgtaaagaaggatatttgtttgaaaccaagtacgtttttaaaattttcttacatttagaccactgtacaaaagaagaccaatgtatagatataaaaatctatgtttttttctctatcatttgatattcattttgtttaataattttttgtttttatattactgaacactgtacaaataatatctatacatatatctatacataaaatcctgacacacttgacccactctctctcacacgctatctctctcccttatacctctctctttcaccaaacaaaaacaaaacgtactatgactattctactaattataaatagtacatgtactagttttccaattaagtttgggaaacgtactattttccaacttattcctaaaaataaatggtatttaactataaaattaataaaaataagaataaaaaagaaataaaagaataaaggtgagatatgtgtctttctagagatatttaagaccttgtaagatttgtttaaagacctttccctccatatgttttctttttagggtaaattgcgggtcacacccgtttaccatgttttattttcatggattgtcaaagtcaaatgtggttttcaccatttgtcttttcgcctgcaaaatgacgcttctgcccttgcgcttctctcttagtaactgttgaaatgtacggtttagtttaacaggtttagttacgtacactgttccggttcagttgaagattttttgtttcacgtccacacgattcggttccgttacaagtgagattatttccattattccgaagtgacatcaacatttaatgcccccaaaaagtttagatgtgactattgtcacaattaatgcaaaatcatcattacatcaaataatattaaaaaaattattgataataattaattaaaaagttgttgagataaagaagatgaacccaggaacaaagaattattgagaacgtacattgctgttaaagaagtgttgatcttgtttttgtaccaagtttggagccaaaacaagcattgttcgtgtaagtaatgaagttcttttaagaagttttttgttatgtcatattaggatcttgattgtgttcgaactccatttttttatcagaaaatttgcaaaatctatatttgtttgtttaaaatagtcaaatgataattggtatttaggtttataaatgtgtagtatcgacattccatttgtttttttatatgtatagtatttttcagttgcatttaatgtgtgtctcctgaatttatgatgcaggtgggttatggatattcccgtatttactatggtcggtgagtggaaatgcaaagaaggagaatggaaatttgaacctgaggaaggcatctttggtcgttgtgtacgcgttcaggaaaccatgacgtacacggactttgtccgtacactccgagaggctttcagtttgaagtccaccgagatcaatcccataattagctactggatgccgggagaaatgtcagtgctgatagatactaaacgccctcctgtatacattgacagtcagatgggtcttgatacgttttttttggttcgtggtgggtatctttctctcaacttgttcgtctttttcaataatacagtgaaggcgttcgggaatactgtctctaggtctcatggtgaagtttttgaaagtgaccgtgtgtttgatagtgctacaaatgttgatgaaaataatgaggatgcagaggagcaagccgatgttgaagacgatacaacagaagaggatgaagtggaggagggcaacgaagatgatgatgggtgtgatgattatcttggtgtggatggatctattgggggaagtactctgtatcctaccacagaacggtagtgaaggtattggcgaagaatacgattacaacaagtggaacgatgtaatagtagaagaatatgtacaaggaaatcttgaggaagacgtcagtctcactcaacagactactcaacatccaggggaattcagtcgtttattggaaacgtgtacgtacacgggtgttagtgtacctggcggagatacaggggaattcagtcgtctcttggaaacgtgtacgtacactggtcttagtgtacctggcgaagaaacaatttctccattgggttacggtacacgctgcgaagggcaaagggattccaatcttatttgtatagacgaagtcaccggggatgaagtgatcgacggtattggagcttcctcaactgggacacaaaatgataatggggtagttaccgcagctgaggcttaccaagtgtataatgaatttcctaagttacatggtggcgagttggcgaatctcggtaacgatgctgctcctgtgttcgatgacttactcaattttcgagctgatgagacacaggttgaaatcagcaccacatgcgaaactttgtttgttggaagtgtttttaagaatagaaaagtcctgcaacaaacaatgtctcttcaaccgataaagcaatgcttttgcttcaagcaacctaagtcatgtcctaaaacattgaagatggtgtgcgttgatgagacttgtccatggcatttgactgcctgcgtcgtgaaggattcagaaagtttcaaaatcacttcgtatgctacgacacatacgtgtaacatcgactctcggaagaactacaataaacatgctaattataagctcctcggagaagttgtgaggagtagatacagttctactcagggtgggccgcgagctgtcgatttaccacagctgcttctaaataatctgaatgtgcggatttcatattctaccgcttggagagcaaaagaggttgcagtggaaaatgtaaggggggatgagatagcaaattacaggtttttgccgacctatctgtatcttctccaattagctaatccgggtacaataacacatctacactatacaccagaagatgatggtaagcagcgcttcaagtatgtctttgtctctattggcgcttctatcaaaggtctgatatatatgaggaaggtagttgtggtagatggaacgcagctagtcggaccttacaaaggatgtctccttattgcatgtgcccaagatgggaacttccaaatattcccaatagcttttggtgttgttgatggtgagaccgatgcttcttgggcatgtttttttgaaaagttagctgagattgttccagacagtgacaatttaatgattgtctcggacagatatttatctatatacaaaggcctaagtgtggtttacccgagagcgcatcatggagcatgtgctgttcaccttgagcgaaacctctccacctattatggtaagtttggtgtgtctgctttatttttcagcgccgccaaagcttatagggtcagggatttcgagaatatttcgaactgttaagggaaaagagtgctacatgcgcaaaatacctagaggacataggatttgagcattggacaagagctcactgtagaggagaacgctacaatatcatgtctagcaacaactctgagtccatgaatcatgtgttaacaaaagcaaaaacttatccgattgtttacatgatcgagttcattcgggatgtcctaatgcgatggttcgcatcgaggaggaagaaagttgctaggtgcaaatcttctgtgacacctgaggttgatgagagatttctacaagagttgcctgcgtcaggtaaatacgctgtgaagatgtctggaccgtggagctatcaagtgacaagtaaatccggtgagcattttcatgtcgttctggaccagtgtacgtgtacgtgtcttaggtacaccaagctaagaatcccatgtgaacacgctctagcagctgcaatcgagcatggaattgatccgaagtcttgtgtcggatggtggtatggccttcaaacgttttctgattctttccaagaaccaattctacctatcgcggatctgaaagatgttgttatcccacaacatatagtggatttgatactcattcctccatacagtagacgaccaccaggaagaccactgtccaaaaggatcccatctataggtgaaaaccgggtatgtactaacatcgttcattcatctacttgtattttgagtattaccatgcggagatttttaacttcctgtctttgtcacttcagaaaaagagacagaaaagagttttaccaaatcagtgctcacgctgtcgacaagcaggtcataacaagaagacgtgcaaaaatccaatctagttctggtgacaagtttctgagccggccaatatagtgtacgcttctgtgttttctcggtgtacgtaagtttatatataatccacctgtaactatgtacgttgtgtacgtacgtttaaactctacgttcatataactatgtacgtttttgtctgtgtacgtgttaaagttcatgtaataagggtacatagaggtggttgctcaatattttgagtaatttgaaataagttttttgaaaatctaacttattccccctcttaaatgaacggagttggagacatggttcggtatattgtggttatgttggtatttaatggaaaggacgtaactgttgctgtttattgtcaaatcaacgttataattaccctatatgacggttaccaggctattaccaaatatttgaatcaagtgtagttggaaccgcattaataactgtagccgttccagatttcctctttttaagtctcctcccttccttaattttatccacaatcctcattctaaacccatttcttgtgccggcagttatatcattcacaaaaaaaaatttagtctttcgattcgcttgttcttgctatccgtgagatggaggggtttcatatggtctcagaattgtgtcctctgatcactgggtggcgaatttatgtctttgtcgtgagagtcttcaagaaggttatatcgcccaacgtcttcgaactcggccttatcctggcagattaagaggtaatttccgttaaatcattatgtgtttttctcgttcattcgcttaacttatatattaaactctctactatcatgttctgtatgtaaagaataaccgtattgaggccaccgttgatcgtcgccttgctccgttttacgaagaccgattcgttgaaaatgagtggaagacgatcacctctttcttggtccgtaagtcaactgacttagtcagagcaacaaagcatgaatacggcatactgtttatggatcggaccgtcgtcgttcatgccccaccgagatcaccaccagttccagatttcgatttcactcccttcgactacattttggataaatctgcttacaagaacgttttagtcggtgaggaggaataactctgacgcttcatttattacatttttgaaaatgtttgtttattatctttgtttctccatcatctagatgtcattggagcgttggttgatgttggcgcattgactacagactattacggtctcaaactgagtttcaagttaaatgatagatagtaagtgttcttttcatttgttttatttacaatgtcactctaaacgctaactgtccttatttctaacgtagcaatgaagtcttggagtgcgaagcccgcaatcaacaggcggagtacttggatggttactttcagagtttgggtaagggaaattttgttgtcgcactcagcttttggcgtttaaccgaactgtctaacccgaagcttgagagccatggtgctatttcaaaggtggttgccaatccggacagatcagaagttgcggatatctcgatggtggttttttagctagagggaatgaaccattattctgcgttttaatataatataagactacatttcaattaagttttctttcccagttgttgttgttgtttccataagaaccaaactacatttcagtcgttgttgtttccagtttccgtttaaatgttaatctaatttgttgttttatgtacgtgccttgttttattgttcaaatcctctcgcaatgtacgtatagtttctggtgtacgctatcgtgtacgtatattaattttggtgccttcaacatcaaaaactattagatttatacttatgttgtgtacgcaatttcccaatgtacgataaaccaagtttaatgtactatatagtgtacgtacacaaagacatctagtaatatttaaagtggtaattcattcaaaagccagaaacataaaaaggacaggcagtttatataaagggaaattcataagataaataaactggaacgattcaaaaaacataattttttcaacgaagcatacacatgtgttgcaaaatatgtgtgcatccgtcataccaaaagacttgagagtagagccgagtagagtagcttaaaccttagcagctttgcttctagtagaatatagcaatctccctggcgtaccagtagaaaaaacaaaccctgcagccatgatggaacgtgcattgccctatgcaactcggcgggtggacaaacctccaagacctttcccagcggcgagcattttcagtgtgaagctggctgatgtgatacatcaccatctctgcaaccgcgtggccagcttcaaag

SEQ ID NO: 193158 - DNA, 424 bp, Arabidopsis thaliana landsberg
tatgaaattaaaacacaaacgaaggaagagcgattaactccacaaatactaatgtcgaaacgcaacgcgccgtttcaagcaccgcctagaccgctagtaaaacaacattcatggtcaccggacgcggatcgagaagaagcttggcttcgaaagaaggggaagcaatcattgggccgactcggtcggagtaagagcgtgacggacgaagatctagaagagctcaagggatgcatcgagcttggatttggattcgagccggattcgcctgatttagatccgaggctctcggaaactcttccagctcttggtttatactgcgccgtcaataaacagtatagtagcagattgtcacggacttcgtctctttcgtcgatcgcatcggaaggtgaaaacagcaattccagcacgacgatcgttgatcaag

SEQ ID NO: 193159 - DNA, 870 bp, Arabidopsis thaliana landsberg
atggtcgagttcacagttttcgaccgacctgccgcatacaacgtaattctcggaactctttggttatacgagatgaaacctgtaccgtcgacttaccatcagtgtgtcaagtttccaaccccaggtggaattggacaagtcctgggaagtcaacgtacgtctagaatgtgctacatgaccgagcataaactcaagatcaaatagcgaccacagctcgaagcgtccccaaatccattcaaaaaagtaggcgacgacctcgtagagcgggtagttataaacgacgatcacccagatcagcttgttggcattggagctaatttgggcgaagatttccgaagtaaattagtccgttttctcaaaacgaataaagcaacgttcgcttggacagttggggaaatgactggaattagtatggaggtgatctcgcacgagctaaatgtcgacccaactttcaaaccggtaaaacaaaaatatcggaagcttggtccggaccgcgcggaagcagtaaatgccgaagtcgtcagactcctcgaagaaggattaatccgcgaagtcaagtatccggaatggcttgcaaaccccgtggtggtcaagaaaaagaatggaaagtggcgtgtctgtgtagatttcaccgacctcaacaaggcatgcccgaaggactgttttccacttccccatattgaccgacacgtggaatcaactacgggacacgaaatgttatcttttatggacgcattctccgcatacaatcagatcctgatgaacccggatgaccaggagaaaacttcctttataacggaacgaggaacatactgttcaaagatctcctcggcaaaacaatggaggtttatatcgacgacatgttggtga

SEQ ID NO: 193160 - DNA, 718 bp, Arabidopsis thaliana landsberg
atgaacgagaaaaaacccaccaaaacactatataagaaagaccgaaaaagttttaagggtgagccataaaccaaaaaccttaccagatgttgtcaaagaacaaaaatcatcatccatgattaacctacgcttcactactaagacaaggcgattgtgtcccggttgaaaaggttgtaaaacagtttgaggatgctacaaaagtggatgttaagtatgaagcggctaaggttttggatttggtctaggagcacattggttaagcaatatcttcggtggagattgagtttttagagatagtagatactaattcatctatggagacatgcaaattcatcaaaatgcttggatgaattagaaaaactaggtggagaatacagtaaaaaaattcaaaaagtgcatattgtttggacaacattaatatgtacaaatagtttacatttaaatgtattattttactaagtacatataaagttgctaaactaaactaatataatttttgcataagtaaatttatcgttaaaagttttctttctagccactaaacaacaatacaaaatcgcccaagtcacccattaattaatttagaagtgaaaaacaaaatcttatatggacgatcttgtctaccatatttcaagggctacaggcctacagccgccgagtaaatcttaccagccttaaactagaacaacggcaaataagttcatgtggcggctggtga

SEQ ID NO: 193161 - DNA, 59 bp, Arabidopsis thaliana landsberg
ttgtagattccgtgagtcatagtggacgatcggttcaattttacacggactcagcttga

SEQ ID NO: 193162 - DNA, 272 bp, Arabidopsis thaliana landsberg
atgggagtcgatgccctcgtcctcggaactgacgcgttctaccttgtccacgagccccagcggccgcttgcccaaggggcgaagccgactccgcgagttcacatccaccccgggcgacagtatttcgacgccgtgctcggcgaccagatgcacaatggctttgcgggcctgacggcgcaagctgatgccgccaagggcgggcaccgacaccagagcaacgccggttcgaagtccgacgtcggacaagatgggttggaaaccagcgcgccgcg

SEQ ID NO: 193163 - DNA, 312 bp, Arabidopsis thaliana landsberg
atggatcagcttcagggtcgactggctccagcagggggagtaagctcagatctaccatggtataagtgtctgttactaccacatctaacatagtccacgaagctacatcatgaaagatatacctatacgcctagcacgctcagcggctacttcagctcttctggcctcttccaaggtgtcatgagattgtatctcttgccttctcagagcttcgtcagctatctctcggccacccttcaaccatactccggaataaaactttccgctcatagcagtggcttcggccgaagggtttttaatatcgtcggctga

SEQ ID NO: 193164 - DNA, 273 bp, Arabidopsis thaliana landsberg
gctcgcgggcggacatcgtgtcgctgtcgacgcgatgtggcacgcttcggatggcaagacgagaacgctgatctctactcgacgtactgggcgctccgatcccagccccgtgccttcgacgtcaagagtgacttcccagcgatgacaccggacctagtcgctccggtcatacccaatttcgcactcctatcggacgtctcatacagagtggatctaaccaatctgacctatgacgcgttgcccgatcccatcaacgaattcgttgagtcgaag

SEQ ID NO: 193165 - DNA, 246 bp, Arabidopsis thaliana landsberg
atgaatgcgttgaagggatccccgaactgtgtaaaatggttggtggagttcaggcactcggtgagtatgtccactcattaggttctaaagatggcatttaaaaggaaactcggtgaactaatacactatcaactcgtaaaaacagtttcacagtgtgaagatctaaagcagaagtacagtgaagagcaagcaaaacgaaaggagctgtacaaccatatacaggagacgaaaggcaatgaattttaa

SEQ ID NO: 193166 - DNA, 87 bp, Arabidopsis thaliana landsberg
gttcttttgcaagagcagtgtgctggtctgcagagccaaatggaagaactaaatcaggaagcccaaaagcatgaatcttccttaaag

SEQ ID NO: 193167 - DNA, 1129 bp, Arabidopsis thaliana landsberg
atggcgcctcgcacgctccctgacgacggcagctctccacccccttacggaagcacgaggacgtcagcaaggactcgacatcttcgacagctgtacttccgccaggctccagcgctcctccgacagccacgacatcacacgaaccgggtgccaaaacctctccggctgccacgacggcgtgtacttagggcgctagtctcctccgctagacacgtagcactccgctacaccccccattgtacacctggatcccctccttacgcctataaaaggaaggaccagggccctcttagagaaggttggccgcgcggggacgaggacgagataggcgctcgcttggggccgctcgctccctctcccgcgtggacgcttgtaaccccctactgcaagcgcacccgacctgggcgcgggacaaacacgaaggccgcgggattcccacctctctcacgccggtctccggccgcctcgctctccccccttcacgctcgccctcgcgctcgacccatctgggctggggcacgcggcgacattcactcgtcggcccagggaccccccggtctcgaaacgccgacagttggcgcgccaggtaggggactgctgcgtgttgacgaacagcttcccgccaagctccagatgggcagtctccagcaacctctccaacccgggacggtgctccgttttgggagtcttgagttcatgtccctcgacggcagctacgacatgatactccttcctcctccgcgcgacaacaacaatggcggtcgtcagcctgcccggcggcagcggaatcgacgacgtctttcccccatggtggaagagcagcatccgggtctgtcccgtcaccttccccaccgcaggaggagcaggcagggcaaccatggccaagcaggaggcggcacctcattggctgtcgagcgagtcgacgacgccggcgcccagcgggggacacgtcaggcgttgacctcgcgcctgagacgaagacaagcgtcgtttccccgcaacacgccaaccccaagcggacagatgacgccagcatgctcgcgaaggacttgctgggcgttagcctcgtacctgagataacggtgcagtccgtccccgacacgcttcgtcaccatccatcgatcaagag

SEQ ID NO: 193168 - DNA, 192 bp, Arabidopsis thaliana landsberg
aaaaaagtgaagcattcgagaaattcaagaggtttaaggcaagagttgaacaagagagcagaacaaccatcaaaacgtttagaacagatagaggtggagaattttgtctctcatgagttcaacacattttgtgaagaaaatggcataacaagacattttacggcaccatacttttcacaacaaaatggagtg

SEQ ID NO: 193169 - DNA, 72 bp, Arabidopsis thaliana landsberg
caacgttggttcgtcttcgtcaaacaccaaaacgacaccgtttacgaaatagttgtaaatcacattggttga

SEQ ID NO: 193170 - DNA, 190 bp, Arabidopsis thaliana landsberg
atgaggcagagaagatggctagaattgatcaaggattacgacttggaagtacactaccacccggggaaagccaatatggtagctgatgccttgagtcagaagtcacaatgcaattgcatgatgatggattctcgcatcaataccctgtgtgatgagttgagcaagatgaagattaaagtaattccttctg

SEQ ID NO: 193171 - DNA, 206 bp, Arabidopsis thaliana landsberg
atgtttgataaattgtcaagtcctgttgtaatgatctgtggacgatacatgattgaaacaggctcaaaagagcagagagaaatttgtaagcctttctcacgtgtcattgttcattggctcttctttttgtttgctttcattttttgaccttttttgtttgtgtacagacgatgatactcccaaactttggccgtcttgcgaaactg

SEQ ID NO: 193172 - DNA, 143 bp, Arabidopsis thaliana landsberg
gctttttactctggttctttctttgtgggcggcgactgcatcccgccggacgcattgatctattgcgtggtgctttattcctcttcatcagcgacgtccttctctttcttcggttcggttcgctttcttggagcagtctctcg

SEQ ID NO: 193173 - DNA, 108 bp, Arabidopsis thaliana landsberg
gttatgtcaacgtcaatcaagaaaatacacgatcactcttcttttggttcttcgaagcattgtctgaatctccttcaacaagacctctagttctctggctcaatggag

SEQ ID NO: 193174 - DNA, 13 bp, Arabidopsis thaliana landsberg
atgttggagccgg

SEQ ID NO: 193175 - DNA, 562 bp, Arabidopsis thaliana landsberg
ttgtgaagcagattctttggattgaaggagttcgatatgaactccgtgagttgtatggctcgaccactcaaggtgcagcctcgggcttagatgagagtggttcgggtacagaatgtgttatctgcatgactgaggctaaggacacggccgtgctgccttgcagacatttggtaacactttctcaatcttttgcttgtggtttcacaattatcatttcattttccaaaccttatcgagatctctgcctgatagctgataataccaacatgaactgtcatataaacttccaaagttatgcattttctttgatagacagttgttgttttcgatcagatccaaccatcaaggtctatagatcactttagaattagtttcaagagaagaactttgtagttgctttattcaaacgtcttataataatgctgtatgtccttctttgcagtgcatgtgtagcgactgtgctaaagaattgaggcttcagtccaacaaatgtccgatttgtcgacaacccatcgaagagctcttagagatcaaaatgaacagtagtgatgaacaacactag

SEQ ID NO: 193176 - DNA, 214 bp, Arabidopsis thaliana landsberg
atggctaggaaaggctatgaaaaagacttcgccgagcgcatcttcaaacaactcgaaggcttcggaagctacggtttcccggtaagccatgcggcgagttttgcattgcttgtctacgttttttcgtggatcaaatgccaccatcccgatgtctttgcagcggcgctgctcaatagccagcctatgggcttttaccggccagcgcaaatcgtga

SEQ ID NO: 193177 - DNA, 526 bp, Arabidopsis thaliana landsberg
tcctccggatcaggccgtcaacgaacgaggacagcagtcagcagcactctcacatccaacggcccagacggcgagcaacacaaacccaacgaatcaaattcgactacttgggccgtgttgggcaataaaagcccaacttatcaaaccagagcgagcccaccaagcagccgccttcttcctttgcggaggcggaaacccgaaaacccttcctcttccgccgacctctcgacagcattagacgcaggcgccgccgactgccgtggagagcgcgaggtagctgcgggtgctagggtttggctcgagatggggaaggcaaagagcaagggccctaaattcgcggcggtgaagaagattatcaccaagaaaaccatcaataagtaaggcaaccatctccagctgccagtccgctcccctatggttaggttcatgctactggaaattctaatttttgtgtatgataggtacaaggaggatgtgctgaacacaagaagaaggacgcggacaaggagaaactcggccggaatgt

SEQ ID NO: 193178 - DNA, 155 bp, Arabidopsis thaliana landsberg
ccagtcttctccaaaactgctgcaacccctcgggcaccggcgaaggcacaaaaatctccatggtcactgagtatttcttcaaaagctttgaccccttcgccgatccattgaataactccttcgggatctcctcggataaatctttgctccgatga

SEQ ID NO: 193179 - DNA, 264 bp, Arabidopsis thaliana landsberg
gagattcgagtcctcgattcgcatgtctaccgtcttttcttaccgcagttcccatcttacatgctgctgaggatttcacagcagaaactggtaaatccgtaacagaccttgtgttacccctacttgaagtctttgccatatcttgcacaaccgttttaagagggtgcgcaccggttcttggttttttagctgccagagtcgttcgcacagaaggagacgtcgatttctgaggaagaaccacaacctttgtgctacaagcagtaa

SEQ ID NO: 193180 - DNA, 450 bp, Arabidopsis thaliana landsberg
tatactggaatgatgctattggaggagatagcttcaatcttcatcacaccatttttgctgatgtttgtcgtgccaaaggtatatttctctcacattcgcgttagtgtaccccacgtcaaaattgagaatatacaatgattgtggtctcacacattttgagttcactttccagcgggtggatgacatcttgcaattcattaaggatttcacagttgatattgaaggtgtaggccatgtttgcaggtaaacaactcttctagtcatatcctgtccagaaattgttttaaagaaatttacaataaggattacattatgatcattggccgtttcgcttgcagctttagtgctttctactttgagaaccatggaaatatcaaatatggttcaccacataatgcaactcgtcgtgagcagagaagctcacaagggaaaatggagaaatcattctga

SEQ ID NO: 193181 - DNA, 160 bp, Arabidopsis thaliana landsberg
aggctataatccggggacttgagaagcgaagagcaagatacgagctgagcagcgacgcggctactgaggacgccgcgacggaggatctgggcgtgaacatggcggagacttgcggtgtctttacaggcgtgaatcagagatatgaagtgagactcgtccg

SEQ ID NO: 193182 - DNA, 75 bp, Arabidopsis thaliana landsberg
atactgaaatatgttagtgatggggagcctattaagagagaggatgatgagcgtcgtgatgaagtcggttattag

SEQ ID NO: 193183 - DNA, 307 bp, Arabidopsis thaliana landsberg
atgccatcgcaaggccatcgtgctgaactactgttcagactatatccagacttagagaaagcctataagatctctcaggagctctcttctattctcagccattccaagtccaggatagttgcctttaaaaaactcgcaatatggtacaataagatagaacaaacgggctttaagtcttttaataccatagcaaggacgatacagaataattatgaaacgatactaaattacttcgacaatagaagtacaaatgcctctgcagagtctttcaatgcaaagatcaaggcttttagatcacagttcagag

SEQ ID NO: 193184 - DNA, 401 bp, Arabidopsis thaliana landsberg
atgtgcagcaagccgcgtgctgccggctcgctgttccgtgaagcacagtggacagcacgccgtcgacgcccgccatgtgctcgctgtcttgcgcagcctatccgcgacgccgtcgaaaaccgtggtgagaaacccccgctgttctcgatgtttattttccgatgtgtgtgatgttcgatgaactgccgccaacaaatttgtgtgttttcgcagctagtggtcgacgtcacaccttgcacatcgctcgtcggcaaagagcccaaactaatggcatgcatgcgcacgacgaatcggccaggttgttcgccttgtatggttgcgatttattttacttacgtattcggtcgatgatgtgcctgcgtgtttatatgcgtgtgaaaataaattgtatgaatgaacac

SEQ ID NO: 193185 - DNA, 582 bp, Arabidopsis thaliana landsberg
aatattccagccgcattgaattctatgacgcgatggagataaagtccgggttggatatacgcgaaataaaaatgcggtatgcaattattctcaagaggtctaaccatctatggataaccaacctggtgttgcaaatgtactttgtaaatagaacaacaataatgtagacattaggaaaacgatgtaggaaacgtatgtaggagtattaaccatggaacagtaaagagtctagtctctggtatggctctaaatctgtcttaaaccctcaaattattgtagctagaatgcaagaagtttttgagttgttcaaatttgtaaaagccacaaatcttgattcttgaaaacattctctagttttatatttggatctacaagaaagttgcaacattcactaaccttcataaatcctttgacacaatttctcattccacttatcaacataaatatctttttttctcactataggtaggtgggcgttttaaccaaaccgaaccaaaccaaatcgacttaaccaaactcaaaccaacccaaaccaaacccaagtttggactcaaaccattcagttatgttgccaaccgataa

SEQ ID NO: 193186 - DNA, 371 bp, Arabidopsis thaliana landsberg
atggatcctggcacacatatggtatgcgctcggttctaccccctggaaccgggtgtgacagtgcggaggagcctagcttgctggcgcatgctgaacaggacccatgctggcgtaatgcgatggaggaagacctgcgcgccatcgaggagaactgaacctggacgctcactgagctgcctcctggctggcgcaccatcgggctcaagtgggtgttcaaggtcaagaaggacgagcatggtgccgtggtgcgacataaggcgtggctcatcgtaaagggctacgctcaacgccaagggattgactacgacgaggtgtttgcactggtggctcgcttggaagctgtgcggctgctgctggcgttggcggcgtag

SEQ ID NO: 193187 - DNA, 620 bp, Arabidopsis thaliana landsberg
atgaacaccaacatcaaggtacgaggggaatataggtctgttctattgcaggtaatcagcattgtccctgctttagctggctcggagctttggccaaaccaaggctttttcatcaaagtctcagattcttctcactccacatatgtctcattgagcaacgaagacaacgaacttatcttgaacaacaaactgggaataggacaattcttctacgttgataagcttgatgctgggacacctgttcctgtattggtgggagttagaccgatctctggacgccatccttttgtaggaaatcccaaagatttgatgcagatgttggtaccaagtgagacaacacctcgggaagaagaatatcacaaccagaagaaggtgacgacaatatatatacactatcaccagaattttgagctattacttcttgtaagagatctgttctctaatacaaattctgcagcagaaagatggtgcaagatcaaacatagtggagaatataaaaaaacatcaaccttttgtaatcaaggaagagaagacaggtgtggcttcacgttatatgaagggtatttcaaattcaaaggcaagtggatcagactcaagtagtgggggtagcaacaatgaag

SEQ ID NO: 193188 - DNA, 130 bp, Arabidopsis thaliana landsberg
aaaatccaaagatctagaaaagtttagatcacgttggaagaggagattcccacttatggagctgaatggctatggattgtgggcttatgatgctaccaccgcattggccacggccattgaagaagcttga

SEQ ID NO: 193189 - DNA, 142 bp, Arabidopsis thaliana landsberg
attatcgaacacccacgggaaccacaacaaaggagaagcgggccaggcccaaagggccacgggccgaacggaggacaccgagcccacgagggacgccagaagaggaacacgaaccaagacagagagaaaccagcgacagtga

SEQ ID NO: 193190 - DNA, 84 bp, Arabidopsis thaliana landsberg
gtgcactgtcttaataaatttgcagatttacgagaagagtttgcagcccatcgcattgctttatttacaattcattctctataa

SEQ ID NO: 193191 - DNA, 107 bp, Arabidopsis thaliana landsberg
gcaagctccactccacgtccttctccattgcattggtggccataggagcatcagccgaggacagccaccagtgcgaccccaacatcctcgccttgcctctctcttag

SEQ ID NO: 193192 - DNA, 360 bp, Arabidopsis thaliana landsberg
ccgccgcggcaatgttttctcaggcgacgcctaaatctacagccacctgaaaattcctccgtaatctcaatcaccgaaccatgtttctcaatttcgacattgaatcaaaaaagacgaaacaatccttgtttctcgacgaagacatctgtgaagaagaagagctacaaagactttaattttttctttctgagcaagtatggattcatcatcgacgaaatcgaagatctcacattcacgcaagacgaacaaaaagtcaaacaagaagcacgaatcaaatgggaaacaacaacaacaacaagacgtcgatggtggtggtgggtgtttgagatcatcatggatctgcaagaatgcatcgtgtag

SEQ ID NO: 193193 - DNA, 248 bp, Arabidopsis thaliana landsberg
tgcagtcccgaaatcacccgcggcaaacacacgcgcacggcctcgcccagcggctatcaatacgacgccacgcgcattcgcggcttcagcctcacgcatctttccggggccggttgtgctggtgccagcggcgacatcccgttcatgccggtcacggtgccggtcaccagctcgccatcggccgataccaccgaccacatctacgccagtgatttctcgcacgccgacgagcaggcgaaagccgggga

SEQ ID NO: 193194 - DNA, 46 bp, Arabidopsis thaliana landsberg
atgactttgatctccggcgtgtccgagaggaagtctgagatgaaag

SEQ ID NO: 193195 - DNA, 171 bp, Arabidopsis thaliana landsberg
gcagagccagaccgagtagaagaaggctacaaggatctttgcacgcagagaagttggagacccataaaaagcaacacaatcatttcaaactcgacccgttcagcagcttagcattcaacgctagctcagcgttccgtgcagctgataagcttgaccaaagccattttgtag

SEQ ID NO: 193196 - DNA, 210 bp, Arabidopsis thaliana landsberg
gccgtgggtctcgcagattttatccaccatcgaagtggtggtgagtgctttgacaacgcggcctttgccttttcgatttttgataaaatgctccagcaacaaacaaatcagattatgggttgtaagagcgttgccacggccatccatgccgcccacgcggtccgcatcaccgtcggtgacaaggcacaaatcgtgaggatgttttttcag

SEQ ID NO: 193197 - DNA, 768 bp, Arabidopsis thaliana landsberg
gtacgtgaatggaataaatacagtccttagcggcagcatacctgtcctcgggaaacttctaacaccagtttacttccagtttttccttgacaaggtaattatatagagtgtatgatttgaataccttcatgatctgatggttgcggccttgtgcaaatttaggacccgcatgaaatggggtcatctccttggttatgacttttacaagaatataaaagagattttcatgctaccttgtataactctgtgcagctggcatcatccctaggaccacggttctatgctaatattttcagatgcaagcaactatccgaaactggagctcaacaggttagcctgcatgctctatgttcctccatttggatgcctctgattctctctgttgtgatttctctaatagtcaactagtgaattgcctagaatgatgttccatgtgaaaaattctgtttatcaggtgtatccatagactagagccaaactcagtctggttatatcgccttatcgcttacactttcttcttttgtcgatgttaaagtgactatgtttgataatttcctaattgtctagtatgattggagtgttcatgagatgttatgtttctgagcccttgttttttagttgtctagagttctaatatgaattatatgtcttttggtttcacagatgttactagatacgcaagctgtgaagtcgattctactagaaattccttcccttgccagacaggttagctcatcacaaccaatttatgtcatttctgttatctcg

SEQ ID NO: 193198 - DNA, 97 bp, Arabidopsis thaliana landsberg
atggttctacatgttatgttgggtgaagttgtaacaaagtttttgaatatgaacaatggagttggggaaggtggaagtcagcaaaccgacctacatg

SEQ ID NO: 193199 - DNA, 86 bp, Arabidopsis thaliana landsberg
ctagagaaagtgaaattgaacggtcgagttcttctttgtcccgtgcacctcttgaccgatcatcctgtgattcgtttattcgttga

SEQ ID NO: 193200 - DNA, 51 bp, Arabidopsis thaliana landsberg
tgttatcttcgtgtcgtcgcgtcaatgtggtgaagcaatgtggttcgaatg

SEQ ID NO: 193201 - DNA, 246 bp, Arabidopsis thaliana landsberg
cgcgacgccggccgaagcaagcggggcggtgggatccggtcaagcctggacttccgcgcgcgagatccgcggctagttggggaagacgcctgctgctggggcccgcgcgtcatcgacggtgcgtgcgcgagggttgtctgacaagaggggccccgcatgtgtgcatccgcggtcaaaggcgcatgcgcggcatccgaccaagcggtggagcacctgcaaatcgggcccactggccagggcgagtga

SEQ ID NO: 193202 - DNA, 164 bp, Arabidopsis thaliana landsberg
agttggactgtgtagaacagcgacaccaaatttatttgcgagtgtggagaacaaagaagaagtttatgagcaaaaagatttgtaaaacgcgtttggcaaaaatctcaaaaaaaatctttgttgttatgaatgccgaaattaaagagcagtatgtaacactgtaa

SEQ ID NO: 193203 - DNA, 159 bp, Arabidopsis thaliana landsberg
gtcgaggttattttgcaatgcagtgtcgatgagcgcgacgaggtggcggtcgttaaagaacgttttccattgcagtgccccgatacccgtagagtcggcctggcctgcgaatgttgccggggttttgatctgtgcgcgttgctccacgggctgcgttaa

SEQ ID NO: 193204 - DNA, 1252 bp, Arabidopsis thaliana landsberg
aaaaagagaaaaagaagcaaaagatacttcaatggcgcaaactactgtcactgtagtcgcgaccaaacgcgatgctcttgatccttacatcaagattcttcagaatcgatcaaacgacatcgatgtctccttctcttcttacctcaaaccagacaacaacgaacaacaacaaaaggagaatgaagatactgagctaagtatcttcgaagctcgaagttactttagcgaaaacggaagcaacgatagtcgatgccagacgaggaatctaagtggtccaagattttcttcggtcgcatctgcaaaagtgtcttcttttaccgtgggacaaacggcatcctctgaagctagctggaacagccaaaccggtttgctctctaacaaaaaccgccaaggatcggacagagatggacgtagaagcagcaagaaaggaccaagatggttttttagacgcaggacttgtccatgttctagctccaagtccgttcaggtccaagaatccaaaccaagaatcgcagtgcccaaaaccggttctgaccgaatcgtctcgaaccgaatagttcatagtcatcagacgatatcttcacctgagccaataagattaacgatcccttcaaacactgtgactcggtccatcgattacactgcaaacaaagaagctagagctccagttagtaattttagcttcccaactctaaacgaaacttcacaattatcagaaaatcccaagaatccggttttgaatcatattaaaccggtacgaattgaaccggctctgcttccgattaaaccggttctgaatcctacgagtcccaagggagtcatcatagacgaagaagccacaagcgacgcaagctccgatctttttgagatagagagcttctctactcaaaccgcagctcgtccatgggctccaccagtacgggactcgatggaagagaccgtgtctgagtacggttacgagccaagcgaacgaagtgttacttggagcgttatgaccgccgagccggcctcggccgttgcagctaacttctcaagaattgccttgtcgtcatcgtctacagcatttagtggttacgataagaagagaaccggtttgttgaactgtcattgtgagaaggcggttatggttaacggcgataagcgtttagtgcaaccggttaagagcgttggtgttcaaaacgacgtcgcgggaaaggtgttgtgcaacaatggcagttctaaactaagcgtgacgagtagaccaaggcaatga

SEQ ID NO: 193205 - DNA, 1491 bp, Arabidopsis thaliana landsberg
atgcagcacgcttcttggataccggttaactggtcccatccccaaggagattggaaacatttccacgctcgtaagactgttagtacaaacttttcgatgttgtttggttgagttaaagttggtttagttgatgtgaagctattgttcttgtgtctacataaattcagacttcattatgaaaatatgagtgttcatttgtggtcaaatattgagtgtcctgcagtatttatgctcttcattgacaatgctatttctaagactttactatgacctgattcttttaattacatagtgaggacattaatctactcttgatttttgctaataactgattgcccagcctcttattcttgaaacaaaatactctctactttgggctatgcatctagatttggctgatactgatacatagcatgcaaaagtctttctccccttcagccaaactccttttgcatatgaaagttagaaatgtgtttaagtaactatctgaatacaagaaaaggtgtcacagttcatttaaaactttctgttattcattttggtttggtagttagttcattccttacattgtttcaagttttgatcatgataccctttgctagtaaataattcattctttgaacctatttgtagtgtcttggaaaataaccagctttctggaacactgcccccagagcttgggagactctcgaaccttaaacgactgcaagcaatgagttccgcatttgtgtgttttggattgctgcttgttttgttctgttcacactaaaaacccttgattgcttttttgtcagctttctgagctcaaacaaattccgtggaaacattccatcttcattctcaaaactgaccaacatgaggattttgttagtatccttgttgtttaaacaagttatataaatatttgcatactttgagattctaatgttttatttggctttgtaaacagccgtataagtgacaatcagtttagaggaacccttccaaatttcattgagaagtggacagaacttgagagtctgtaagatcctttactacagattactctttaatgtttttaactctgttaaagttttagctactaatgatgggtctgatgtatgtctgcctcagtgttctttatgcaagtgggttatctggacctatacctttgtcaatcgctcatctcacaaagctgaaagatttgtaagtagtctatgtagtagtgttttatcatatttttctagagtgtttattgacttaggctcaatatagttttcagaatgataagcgatatgactggacctgaatttttctttccaccactacagagcatgacacagatgaggcaattgtgagtctttaaatttgattgaattacaaaacaactctgttggtgatgagatttaatgttcattgatgtttgtctttttgcagggttttgagaaatataaatctgaaaggagagctcccatcataccttggaacaaataccaccaacttaacactctt

SEQ ID NO: 193206 - DNA, 64 bp, Arabidopsis thaliana landsberg
tgggttggattatatgatcaacattgtcatgaaaaaccatgcgaggaatctgttgttctgtttt

SEQ ID NO: 193207 - DNA, 230 bp, Arabidopsis thaliana landsberg
tcgtatcggatcctaaaccagaatggaaaccaaatcaacatcaagctcaaatactcgaagaacttttcatcggcggtacggttaacccgtctctaaccagtatcaaacaaatcacgatcaaacttcaaagttatggtgaagaagtcgacgacgcagacgtctacaagtggtttcacaaccgaaaatatagtcgcaaaccgaagttagtatcatattttatgttcttgtaa

SEQ ID NO: 193208 - DNA, 481 bp, Arabidopsis thaliana landsberg
atgatgaaagaatcagagaaattctccagattgcagaaactgctcgatgagctcggcgagaagactgccattgtgtttgttaacacaaagaaaaattgtgactcgattgctaagaatctgtataaggcagggtaccgtgtcacgaccttgcacggtgggaaatcacaagagcagagagaaatcagcttagaaggattcagagcaaagagatacaacgttcttgttgcaacagatgtcgtaggacgtggaattgatattccggatgtggctcatgtcataaactacgacatgcctaaacatatagagatgtacacacatcgtatcggacgtacaggacgtgctgggaaaagtggtgttgcgacttcgttcttgacacttcatgataccgaagtcttctatgatctgaagcagatgcttgttcagagcaacagtgcggtgcctcctgagctggcgagacatgaagcgtccagattcaaaccag

SEQ ID NO: 193209 - DNA, 435 bp, Arabidopsis thaliana landsberg
gcgcgcacgcgcggccttcgggcgggcgggcgccggcacggctgctgcggcggcggcttcggcggcagcggaatgcgtgagagagagacggcgcgtgagatacgagagataaggcagggatggaagataactgcctttattttcgtcggcctcactgaggccgacgaaaatagtgggcagttaatgccttattttcgtcggccgggagaaggccgacgaaaataattgacttatgttcgtcggtctggctatgaccgacgaaaataaagcttattttcgtcagcctcggagcccacgaaaatatctttcctattttcgtgggcaggccgacgaaaatatgtactggcccacgaaaataagctaaattttcgtcggccctcgggcccgacaaaaataactatgtattttcgtgggccgaccgacgaaaatagccag

SEQ ID NO: 193210 - DNA, 302 bp, Arabidopsis thaliana landsberg
tcgctgcagcagaaaatagatctggcaaaagagctcggtgtccgcggcgtcgcgatcttcaagttcgacggcggcgaagatccgggatttggaatgtccctcgcaagtgcaggcgtgtcacagagcgctggctccacgagcgggagtactgctgcttcgcaatcgtcgggagggtcgctcacacgaccgctcgatatcggctcaaccggggaagacgtacgcacgttgcagaagatcctgaacaaagatgcgtcgacccgcgtcgctgcaagtggcgtcggatcgcccggaaacgaatccac

SEQ ID NO: 193211 - DNA, 382 bp, Arabidopsis thaliana landsberg
atgaagccaatcgatgaaccggaaggcttcttctccgagatcaccaatgccatgaggaccacgaaacgacgtcgggtgtagcaaaacgccagctcttctcctgctctctggatccggaaccggtagccactgctcatattctgctggaaaatcttcaccgacgctaatactagaaagacacgtggaattactcgaaacgacctccattcgaaacgactgcgacggctttgtcctgttcctgaggacagctgcgtcgattaaagaatccggagaggataatcggaaaagcttgagagaagaacagagtgaaggagaggacgacggcctaagtagaatcgacatggataatgatcatccaattcaaagctccactccactctaa

SEQ ID NO: 193212 - DNA, 322 bp, Arabidopsis thaliana landsberg
atgcgtatcaaactgtcagtgaatagtgaaaaatgcaggaagaaggcaatgcaagtagcagttgctgcagatggttagtgttaaaacagatttaatgttttgaaccgatcgagagtggttttcttatggttaaaaaaaatgaaactttaatacatctgtatctggcaacgcaggtgtaacttcagtggccatggaaggagaatttcaggatgagcttgtggttgttggagatggagtggattcagcttctttgattatggccttaaggaagaaagcatgtcatgtcactcttgagactcttgaagaagtgaagaagccacag

SEQ ID NO: 193213 - DNA, 191 bp, Arabidopsis thaliana landsberg
gtaatttaactgagatggttgattcgccttcgaacggtgataaactgcacgtctcaagcattattcataaagcttgcattgaggtggatgaagagggaaccgaagctgcagcggtctctgttgccatcatgatgccccaatgtttgatgcggaacccggattctgtagctgaccatccatttctgttcact

SEQ ID NO: 193214 - DNA, 90 bp, Arabidopsis thaliana landsberg
gatttggatatgaccacagaaagggaggaactaaaactttcatcatccgtgcctctgtttgatgtcatcactcagagtttgcagatataa

SEQ ID NO: 193215 - DNA, 154 bp, Arabidopsis thaliana landsberg
atgtcgtcggagaaacgtgtaggcatggtcgagaaaagtaacagcaagagacaaagagtgaaccaagttcccgtgttcagcatcaacgaccaccacgacgttcttgttgaaatcctccggcgactagacggttcatctctctgttcagctccat

SEQ ID NO: 193216 - DNA, 172 bp, Arabidopsis thaliana landsberg
atggttatagcaatggaaaatgtcaatggagagacgagagctcaatgccatgaagattgcattacagggttgtgccaccacaggaacaattccgatcaagtgccttcagaattgttaccgtcgatgtcccggcggaaacctcgtcgtacattaggtcaccatttttcagaag

SEQ ID NO: 193217 - DNA, 148 bp, Arabidopsis thaliana landsberg
aactagaaagactaaattgaccaagttttacaaagaagaagatgaaaatgctggattgttggaaaatggaatgtcaaatcatctagaggagtcgaaaccaacaagtggtattacaaatggcttaggtggtgatatttataatctataa

SEQ ID NO: 193218 - DNA, 551 bp, Arabidopsis thaliana landsberg
atggtcggcatagatcctgaggtcgcatgtcacgaattgaatgttgacccaaccttcaaactagttaaacaaaaacgacggaagctcggcccggagcgctcaaaagctgttaacgacgaggttgataaactcctcggcgctggctccattgttgaagtcaagtatcccgaatggttagcaaaccccgttgtcgtaaaaaagaagaacgacaaatggagggtttgcatcgatttcacggacctcaacaaagcatgtcctaaagatagctttccactcccccatattgatcggatggttgaagccacgaccggcaacgaggtattgtcattcatggatgctttctctgaatataaccaaataccgatgcataaagacgaccaggaaaaaacctccttcatcatagacagaggaacgtactgctacaaggttatgccgttcggactaaagaacgctggggctcgttatcaacgattggtaaaccagatgttcgcccctcagctaggaaagacaatggaggtttacattgatgatatgctggtcaaatcgacaag

SEQ ID NO: 193219 - DNA, 260 bp, Arabidopsis thaliana landsberg
atggttatcagaaaaataaatgacctaaagttgcgctccaggccgccacggtttatcgccattttaaatcttgatatggtattggaggctttactaactttagcaaagcgcatatgtcaaggtataccttctgtcacctcattaacccagtttcggccagcgaaagcccagacctgttcaaggtacagccgtttacctttcaacgcatggtaaaagcaagagaatatgcgaagcaggaaaacattcaggtacaacagctg

SEQ ID NO: 193220 - DNA, 151 bp, Arabidopsis thaliana landsberg
atgaagtggatcctgcacagcaagcaaagagaacaccttaatcaaaattcaacctcctcttttactgtgagagaagagcaaccgtacgccgatgtaagatcccggggacaatcatccatttcagctggacattcttctagagcacaagaat

SEQ ID NO: 193221 - DNA, 466 bp, Arabidopsis thaliana landsberg
aataattggcgggatggaatattgaaaaataattacttgttagcggataaacctttaccgggattttccgcagtaccaacaataggatgcacgccgttgactgttttgtttactgacacaagtaccagtttatccggcgcgaagatcaccaatcgagtatggaattttggtaatgctatcgcaacaacaactaataaaacgatatctaacacatattctttgcagggagattattcggtatctttaaaggttacggattctttaggttgtgttgattctatttacaaaccacagttcattcatgcatcaaagccagcggcttcattttcaactattgcattcgggtgcgccggaactagtgtgccttttagcaacggttctcaaagagcatcaaagtatttctgggactttggtgatggagatacttccagtctttttcagccatcacacgcatattccgctgccg

SEQ ID NO: 193222 - DNA, 419 bp, Arabidopsis thaliana landsberg
ctaagaacccgaagaagtgctctgtggctaagacgattgtgaagaaagaaataaagattgagtcaaacatagatgaacttggtggtagattgctggtgaatgcatcaggtgatgatgttttagctaagaaaccgaagaagtctgtggtggctaagaccattgtgtggcaggaaataattgagattgagtcagccacagacacagacacagatgaagttggtggtaaaacgttgtctctttgtggtaaagtggatgcatccggggatgatcttttagctagagatggcaaaaccaaaagaaccaacctgcagattgtttgtgttgatgattgcgattccggtttggttcatgatttggaatataaaaagtacttggcacattttagtgaaacgcggaatgtatatttgcttgaggacaat

SEQ ID NO: 193223 - DNA, 444 bp, Arabidopsis thaliana landsberg
gtttccgatgtgcttggaaaattccctgatctcatggatgagttcaatcagttctttgagcgttgtgagagtattggtatataagattgcatactgtcgttttacttaataagttatctagctgtttctgatcatcatcctttttgtgcagatggtttccagcaccttgctggtgttatgagcaaaagtaggcagcagtctcctagcttcttgtctatgagtatacttttctcttttttttcgtacgttataggaatagaaataacactgcctggtacacttgctgcagaatcacttggtagtgaagaaaatttatctagatcagtgaagggggaggaaaaagatagagaacacaaacgtgacgttgaggctgctaatgaaaaagagcgatccaaggacaagtacatgggggaactctattcaagacccctgatctatcttatt

SEQ ID NO: 193224 - DNA, 425 bp, Arabidopsis thaliana landsberg
atgaggaatagattgtcaactggggaccggatgttgaagtggaaaggcaacgccaatgcaaaatgtgtcttttgtaatgatctagaggagacaagagatcacttgttcttctcatgcccttatacgtatcagatatgggaggagctcacgagaggcttgctgttggacaaattcacggcggactggaaagaaatcacaaagcaaatcgcaaaaaggagtagagaccaaacaatgacgttcatcacacggtacgtgtttcaaaacacaattcactcagtgtggcgggaaaggaacaacaggagacatgggaaacatccattacaagctgcaatgcttgtaaagacgatcgataaaaacgtcaagaaccggctaagcacgctcaagaccggaggcacaccaaaatatgaagatggcatagtactttg

SEQ ID NO: 193225 - DNA, 368 bp, Arabidopsis thaliana landsberg
atgcgggcgcgacgttaccagcggtgcatgaaccatgtgttcggcgaacacatcggtcgcacagtcgaggcctacgtcgatgacatcgtagtcaagacaaggaaggcttccgacctcctctccgaccttgaagtgacattccgatgtctcaaggcgaaaggagtcaagctcaatcctgagaagtgtgtcttcggggtgcccggggcatgctcctggggttcatcgtctccgagcgaggcatcgaagccaacccggagaagatcgcagccatcaccagcatgggacccatcaaggacttaaaaggcgtacagagggtcatgggatgcctcgcggccctgagccgttcatctcacgcctcggcgaaagag

SEQ ID NO: 193226 - DNA, 103 bp, Arabidopsis thaliana landsberg
atgaagatgatgaacaaggattctgagaagaagaaaaagggaaatccagtgtcttcatcgactttgcctcagcgaattaagaagaaagccaaagatttatcag

SEQ ID NO: 193227 - DNA, 111 bp, Arabidopsis thaliana landsberg
atgtacttatttcatactcggatcatcgatcgattagcgactcttgggatcaaacctattttgactttgattattttgaaagaaaatagaaaaaagaagggcatagatgag

SEQ ID NO: 193228 - DNA, 279 bp, Arabidopsis thaliana landsberg
atgcctttgacaggcttctcagcgtcctttacattgggaccctatacacaaaatttgtaagtgtcattgaatcctgttttagagtcacaaaacagagaattcatcagactttcaaatggattgacaataaaataagtcgtttgtgcaagaaatacccgggggtgaaggaagagtacattaggtttagcttcgtctgcatattttacattcctagtctacctggacgcgggataaaaagttttatggagttctttggcatccgagctcagctggatgagg

SEQ ID NO: 193229 - DNA, 338 bp, Arabidopsis thaliana landsberg
gtactttaaggtgttgtggatgaaaagatccctcaagctcattctctttagcagattggtccaatttctgttggtaagggacatctaacaggaaaagagattatcacgcgaatggtaacagatatgactacagctaaggagttctatactgactctaatggaagagactttctgaaacgggtaccctaagatttttctgtggtctcgtattttaaacaccaatgagatcgtattgcccggtttcaacaaatagcattaaactctattgcaggtccgggacaaccgaacagactggcatcttgtagagaatgagccaatagctcgaaactactatcctg

SEQ ID NO: 193230 - DNA, 91 bp, Arabidopsis thaliana landsberg
aagctgtagtcagtgcaagcgccgcacgctcatggagacacttacgggggcacggccctacgcggccactggactggaatccgcgaagatt

SEQ ID NO: 193231 - DNA, 22 bp, Arabidopsis thaliana landsberg
aactagtccgtttcggggacgc

SEQ ID NO: 193232 - DNA, 227 bp, Arabidopsis thaliana landsberg
ggtgtaggagcaggcgcctcctcctcgtattcgtccgacaccagccccgacattgactcgcgcagtggcttttgcacgtccacgaggatgtttcacatcatgcacgcaccatcgttttcgtcgtcgtcggacgtcccggtcgtcttcacggccttcatcgtgttcttcctccccaacctgctacccacggtcgcagcctgcgagcagaccgacgctcgtctacgcag

SEQ ID NO: 193233 - DNA, 142 bp, Arabidopsis thaliana landsberg
atgtcgaactgcgaaaccatcgtgctcggtggcaaaggcaatggctttgaagctgaggattggagaactccatatttcaatcctaccgcagataatgtctttatgttgatcggatgttctcctaaatctaatatatttcaag

SEQ ID NO: 193234 - DNA, 113 bp, Arabidopsis thaliana landsberg
atggttggtgacgaagggttttggaacgaggtagaagcggttcatgctttgatcaagcttgttaaagagatggctcggagaatagaggaagagcccctgatcataatagaaag

SEQ ID NO: 193235 - DNA, 194 bp, Arabidopsis thaliana landsberg
taattgattatattatcattgttcagcggattaggagaaggaagatcataaaatatagagctattgcaaaagatagagttccagactgcactcaagatcccaaaaattgtgtcagagtttcagtcaaccagtaccatcttcctcctggttgtcaaaacactacacattgttatcgagaaaagtatcatatttaa

SEQ ID NO: 193236 - DNA, 322 bp, Arabidopsis thaliana landsberg
atggcggtgacgatttcgacgaatgctttcgtaaatgcatcgcttttagatgaaagtcggaattctttctggagaccattgtttcatcagccatactataattgccgacgagtcgttcgtcttaattcgaggaaattgaattcaaaggtaatgttttgcttgaatttgaacacgaaggaggttggtttgcaaaaacccggtgataaaggttttgaattcaaacccagttttgatcagtacctgcaaatcatggaatcggttaaaacagcaaggaagaagaagaaattcgacagattgaaagttgaggaagatgatggtggag

SEQ ID NO: 193237 - DNA, 286 bp, Arabidopsis thaliana landsberg
atgattaacccaaaaaggtaaacaaggataaggtaaatacagaatagtcaatccttaagtttcaaaaatgtaatacgagacagtgaattattaagtaaataggacatgataggtctgaggacatttgccttcaccagattgttgctcaggaagatcttcggcaacacactgcaggaaccacgggctgctcgttgtctaaataaagcgatcatacattcaataaatttggaaagtacaaatgaacaacacatcaaacatgtacaaacattggaaaacatctcaaaag

SEQ ID NO: 193238 - DNA, 453 bp, Arabidopsis thaliana landsberg
atggatggggctgccttcgaactagctctcttgggtgccatcgcgggttgtttgttcgtagcacgaacggtgggcgccaaatgttggcacttgcactcaattgcaaggaggccaacaagggtgaacggtggtgacaacagggttacgtgctagagggcaatagctctgttcattcggcctcccacgggcactgtacaggggtatttataggtacctgatcgcccagcgccttgagctaaggacgcatgtgccctcaactacctaggttatccctagaatattcccataaagcggggttacagactgtaattacaggggtgccttcacaggttaggcccgtaaccggcggcggccacgcagggcccgttataatgggccggaacgcacgtgggcctctgagctggacgaggccgcaccgtgggatgattcgtcgccggtcttcgtctggtgccg

SEQ ID NO: 193239 - DNA, 169 bp, Arabidopsis thaliana landsberg
atgcaaatcaacgggcagtatccatacctgcagatacgtaaatggtccgcaaaagtgcccgctccccaaaattcggtgtttttccccgccgaagacggtgtttcccacggtccggggttccgtattgtgttgtatattgttcataccatcatcctatgcaataacccgg

SEQ ID NO: 193240 - DNA, 248 bp, Arabidopsis thaliana landsberg
  unsure (1)..(248): unsure at all n locations
cgaccttcaagcggttcgtcattgacaatatcgaagttgtacctgtgccaaagtgtgtgtgttcgataggattctgattctctctctttttaggatatttgctaaactacgcgtcggttaatctttttatcatgcgcacgcagacattnttactcacattcctctctctctctctctaggtacggactcactccaatttttcccaaaccccaaaaagcaaagcgcacacaacaaccaccagaacacac

SEQ ID NO: 193241 - DNA, 214 bp, Arabidopsis thaliana landsberg
atgacgcttttagcggtggctggaggtttgggatatccttcaatgttggctgagtcttggcaaggtgatgatgcttgtagtggttgggcttatgttagttgtgattcagctgggaagaatgttgtcacgttgaatcttgggaaacatggattcaccgggtttatatctccggcgattgcgaatcttacttcattgaagagtctttatcttaatg

SEQ ID NO: 193242 - DNA, 596 bp, Arabidopsis thaliana landsberg
gaagatctcagtgattgggttggttgggttaagtcacgtttccgttgtcttcttatcaaggtacgcacttcccattttggttcaactctttctatatgaaatcctacaaacactctgctagttctgtggtctgtctcatagtatggcctttgctatgttattgaaaatctctcatctcatctttaatgcagatagaggaagtctatggcatttgcgatccaaatccaacagagtatgttgaaacctatacaaagcagccaaacattgtcttttactggggattacagctcagaaccattaatgtttcggacattgaatctgtgaagatagactttctgaagaatgtcaacagtggaagcttccggggaacagttggtagaatccagttaacccttgtcaaagcgtctcaactgcctaagaatggtgagtgtggtagcaacaacagaagcaagaaggtgacaaagacttgttggcgaatccgggaagataagcagtgcaataatgtaccggtttactcaaagcatttgcctggttatgtggttgggtatcagaagatggttaacagagaagctgatggtatggaggttaaatgttag

SEQ ID NO: 193243 - DNA, 359 bp, Arabidopsis thaliana landsberg
atggctggtcttatgaagttaggatgcttggtctttgtcttcgtgattgcggccggtccaatcacagcaaaggcggctctgagctgtggcgaagttaacagcaatttgaaaccgtgcactggctacttgaccaatggtggtatcactagcccaggcccacagtgctgcaatggtgttagaaagcttaacggcatggtccttacaaccctagaccgtcggcaagcatgtcgttgcattaaaaatgccgctagaaacgtcggccctggtctcaacgctgaccgtgctgctgggattcctaggagatgcggaatcaaaataccttacagtacccaaatcaggttcaacaccaagtgcaacac

SEQ ID NO: 193244 - DNA, 304 bp, Arabidopsis thaliana landsberg
agagtgctcatcgacgacgacaatgctaaaatggctcaatttagacaatcgggaacagatagatttagtgttcgcggcaacggcggaggagcttcttctgatcacgtaacgatcgggatccgaaacggcgtcggtggagctactaaaggtaacaacaacaggtggcgaagatccgtgagagctgataagattcgtcgacttggaatcggttctgttgtgtttgttctttgctttgtgcttcttgttactgttctcgcttactgttatatctctgggtttacttataatagctacgatgataaag

SEQ ID NO: 193245 - DNA, 439 bp, Arabidopsis thaliana landsberg
gagcaattgcaccatgagatggaactactaagaagagagacatgtaaccttgagcttcgtctgcgtccattccatggacatgacttagcctccattcctcctaatgagcttgacggactcgagagacaacttgaacattctgtcctcaaagtccgtgagcgtaaggtaatgcaaatatatgtccatatcaatatatatactctcttaaaactatattggttacacttttgtttgatctctgctattaatatattgaagaatgagttaatgcagcaacagttggagaatctaagcagaaaggtcactctcaaatcactctttttaaactctaatttcctctaataatcttattataccgcttgtttaataatcattaccgtgttatgcatatgatcagaggaggatgctagaagaagataacaacaacatgtaccgttgg

SEQ ID NO: 193246 - DNA, 958 bp, Arabidopsis thaliana landsberg
gtccaccgcgtttcccatcggagctgagagatgatatcctaaccgttgaattaaggccggaggaggacgcggatgatgtgctcttgaccgtcgattcgaaaggggacgagacatcgtctgataccgagaatctaagtgggaggcatacacgagacggcgccgttttgggagggaagagaggaatgattgaggaagagattgaggttaccgcgctatggagaaattcggcggcgacgtggcggcgatgttgcttatccggcgaacccattaaactgactgttctgttcggtgcgcaaaagccagaagatgactttgtgaatttagacacaacaaaaatgaaaacattattcggtaagaaaagaaaaaaagtcaagttaaataggttttttttttttggttaatccaatagaaatcaaagtttaatcttctgttatattaaacacttgatgttaattacgttagatttgactaaaatcgctttgtctatagatttcaatttgtggaaacaacaaattagctaagattatattgttcaatctggaacttctttgttgaattactacactgatgattacagcttcgacggaaaaaagataagtaatggcattcaagtttccaagtgcaatatgctttcactcttatccataagcttgaattcaaaacgtacgttggtatcaagctttctaaaccagtgttccggtattcctctaatccaaacctttctcatatcattcttttggaggtcataataaagaatgtaataaggggaaataatcgtttcgggtgccaagataacctcacctttttgagttgtacctttcagatgaaaagatgtgttacattctctaatatgaacttcaaatgatttgaaaaaaagttgtaatcagagtaatccatgcgtattcatttcaagcctattgcatgcggataagagtgaaagcatcatgcatttggtttg

SEQ ID NO: 193247 - DNA, 501 bp, Arabidopsis thaliana landsberg
atggagggtatctcaacttacaaccctatgcgagttaagggtacaagtcaaaagagatccatttttatgttggttgattcgggttccactcacaattttatggatcctcaaatggcaaagaagttgggttgctcactcctacctagtgataatgcaagagtacgggtggctgatggttacaatctgaaggtgatagcgagaatacagaattttaagtgggagattcataacacgacttttgtagctgactttatggtaattcctttgaaaggaattgatgcagttttgggtgtacattggttgaaacctctaggtcctattacatgggatttcacattgttgacaatgcagtttaaatgggataagaaacgggtgatgatacatggtattcagccttcgtcggtgcgtgctatcaaggctgacaaattgaacaaactgagagactccgaagttcagctgtctatgttgtgtgttgcagacaatgatgaggatgagggagag

SEQ ID NO: 193248 - DNA, 156 bp, Arabidopsis thaliana landsberg
gcagctactatgaacacgagagaacccatgacacggcctacccatgacggtcgaattggtgtagaatcaatgattggtttgtacagttttaggataagccaaaagtacaattacaataaagccatgcacgtgaagttactcccatgtcatgaatga

SEQ ID NO: 193249 - DNA, 124 bp, Arabidopsis thaliana landsberg
gatagtatttaagaagaaccataaagttcatctcaaaccaaatccgacggtccagagtcacctgcaaagcttggcatcgtatacgtgttcagtggtcaacggatcagctacgagtgccgtttga

SEQ ID NO: 193250 - DNA, 95 bp, Arabidopsis thaliana landsberg
tgattgaaaaggtatatgtcgacaagaaaaaaatgattgaaaaggagagagtgaatgagcaaggaattggtcggagtggatggcatgtagaataa

SEQ ID NO: 193251 - DNA, 615 bp, Arabidopsis thaliana landsberg
ttcgtctaggccaagtgtggatccaaaatctatccttagaaggtcaaaatccagtcctcgccaaagtaacaggcgagaacaaccaaccagaaagtgagtattgttgttatattgatggttgtgctttctagttgttacgttttgtgtttttgctgcctttttatattgtaattagctcacaatctaccatttatcattctggaaaatgagtaaatgagaatacaatattggaaatatggcatatactctttagttttacactggggttattggctaagcttaatttatcttggggttctacaggtcaactgagccaggtgtggttccaggaactattctgagcgagtcaaaaaacagctcaatcaaaagcaacagccatgggaaactaaccagaaagtgagtagtgttgttataagtgtgacagcacttatccgatgtatatatggtctagtgctagtctgctagattgtcgacttccttgctgtctgtcaaacttatattagttctcagtctatcttttgtcattttgaaagggatttgcggctgcacaaacttgtttttgaggatgatatactgccagatgggactgaagtaggttatttcgttgctggagag

SEQ ID NO: 193252 - DNA, 329 bp, Arabidopsis thaliana landsberg
ggctgaacgtgacggccagcatgcgcaacatgggcgacagcgacgcgccatgcttcttcggctggcaccagtacatgcgcttgcgcgagaccggcatcgacggcctgaagctgaaactgcaggcgcagcaggccatcgtcaccaacgacgcgctgattccgctgcccggcgctaccgcctaccgtccgctgaacgccatgccggaacgcgatttccgcacctggcgcaagctggacggctgcgtgctcgacagcggctttgccgcacccaaaccggacgccgacggccgcatccgcagccatctgcgcgacccggaaacccccctcccg

SEQ ID NO: 193253 - DNA, 1065 bp, Arabidopsis thaliana landsberg
agtcccaaagagagagcgaaagtctaaactgccgttcatagaaggaaatttcgtgttcaatcggatatttattgtttacccggtatactcctctatatcggatcaagctctcgtaccgctgagtctcgatcgtatggtatggatttgatttttgggttcttgattgatgaatttctgtggtttgtgccgatttatgacaaatccccatcttattttgcacatgggggaggttgatttaccaaatcgattgattgcttttggagaagaatctctcggcgagagggttaatgtgtaccacaaaatcaaaaccctatgcggcaatataaacgcctttgacgatcaagagcggtccttcattggcgatatttcgctgggacggcttttggagtttccgaacaagccggcgtttttgcgagttttggtcaattcttacgaagtcggcaattggaagttgccaatcctaatgaaatctgggaagtgtacgctggtactcctgtccgatttttgttaagagagttcaagctcgtaactgggcttccgtgtggaaagtatccggcggtccaaaaaaagaagaagaaagggacgactgggaagcagattccttactacaattccttgtttggtctcgaagaaaatgttattgttgataaagttattaccatgcttaagaaaggttggtaactgatcgagaaataaggttaagatatgcttgtttggctcttgtggatggttttttgttgcctacctctcaccatcaaaaaatagaaaaagatcacgccgaaatggctgaggatctgcaggggtttctgtcttacccttgggggcgtttgtctttcgagatgatgatgacttccattcaagagagggaacttgaaaagctcgccactacgtgtgtggtggttcaaggtcttctatacgctttgcaacttgttgttttagaagcagccccaccatccatgaaggccctcaaatatagtagatgaggttgctggtactgaatctgaatctgatgaagaagccgccctcaagcttggcaatgctaaagatatggatgccaaatgcgag

SEQ ID NO: 193254 - DNA, 257 bp, Arabidopsis thaliana landsberg
atgggttcagtgaagagaaaatcagtggaggaatcttctgattctactccgccgcaaaaggttcagagagaagacgattccacccaaatcatcaacgaagagctagttggttgcgttcacgatgtttccttccctgaaaattacgttcctcttgctccctcgttcacaataaaccaccagctaaagatttcccctttacacttgactccttccaatctgaagctatcaagtgtctcgataatggcgagtcagtcatg

SEQ ID NO: 193255 - DNA, 438 bp, Arabidopsis thaliana landsberg
  unsure (1)..(438): unsure at all n locations
atgacatggatgaatggttttacgacaaccacatcccgagagagaagagattatcttatgcacttagaaaactcacgggagatgcttacaaatggtgattgcaagaagttgatgaacgttggtatcacaaggagacgaatatcacctcgtggagagagcttaagaaattgctaaggaataagtatgctccacaagcactaaaacgcgctccaaaagccaattccaaattccaagggttagaagttcaagaaaagaaagcagccttatacccaaatcaaaagaaaacctcaacacccgtggaggctaagacacaacctgatctttttgaagagttaattaagcactttaaaaatatgaaaatgcaggctaagtcaacatgtcaaccaaagaaggtccctgaacaaattgtagttcacaagcaaagacgacaacgatcnc

SEQ ID NO: 193256 - DNA, 262 bp, Arabidopsis thaliana landsberg
ttccggcgagcatatgcaacaggaacgagtttctcatgccaaagaagagcttgcttggtaccgagcgtcttcaggaaagaacctacactcaaacattgacaagacgcatcagttaagtaccaaactgaaggaaaccgaagaggatagtatgcagcttgctccagcttcatcaagacaaaacttggttggtttacttaaaagtgaacaaaaccactttagattaatacaggaggagacagtaaagcttgctcgagtgttgtaa

SEQ ID NO: 193257 - DNA, 165 bp, Arabidopsis thaliana landsberg
accatatctacacgtcttcactcttcgctatgccttccaagcttcgatccatagtctttggagagaacgtaactgcaggcgacacggggaaactgctatccctgctgcgaaacttgctaagttcattgataaaactattcgaaaccggttcagcacgattcaaag

SEQ ID NO: 193258 - DNA, 361 bp, Arabidopsis thaliana landsberg
atgtggctattatccagcggtaccacgaatcacatgtctccatatctgaaatttttcaccactctagacagaagacacagggctccggtgaaattgatcaacggatcaattatcatgttaaaaggtagaggagatgtcaaagtcatgaccaaagaagggaagaggaagacgatcaagaatgtgctttttgttccggatctcgacagaaacgtgttgagtcttggtcagctaggacacttaggctacataatgataatgaatagagacaaatgcattcttaagggtcagagaactgagaaagtatttggggaagccgtgaaggaagagggaggttttgttctgcgttatcaggtgattgaag

SEQ ID NO: 193259 - DNA, 395 bp, Arabidopsis thaliana landsberg
  unsure (1)..(395): unsure at all n locations
atgagcggcagggccgtttttcacggcgtatgggcgtacggcgccctgcacgtgtgggccgaagactccggcctgcctgaaacggccccgccccgccggggccggccctctcgcgcgccccgtccgcatccgttcgccgcccccgcgnnnnnnnnnnnnnnnnnnnnnnnnnnnnnnntggccgagatagcccgcaagtccgtcgaggacgagctgacgttccggctccccacgtcgggcgacgcgccgttcccgtcacccgaactgggccgggagccgtcgtcgggccgtgcgtcgctggcaccgtggcgggtccccgcgctcgtcttcgaggcgccggatgcgcttgagctgctgagcgttttgcccggcgaaggcatcggcgccacgcttac

SEQ ID NO: 193260 - DNA, 51 bp, Arabidopsis thaliana landsberg
atgctggaagatgccgtccattacgtgaagttcctacagcttcaaatcaag

SEQ ID NO: 193261 - DNA, 1181 bp, Arabidopsis thaliana landsberg
tagaccacttttcagtcaaggaaaatgtggataacgtccatacctttgaatccaccttagacatagcgaagcgaagcagagtgtacggctttttgaaaagagtcaacaaaggtgtgctgaatactgataaggcaaaagaaccttcgtgtgggaagacttattgttcaatgcctcaaagtcttcgcttcttccatttcacttccaaaagagagaatccttttccaaaaatctgcattatcgtggccatcctttaatggctcatgtttcttcttcctcgtcatcggatccctcaacgcgccagttcgacgtgtttgtcagtttcagaggcttcgacacacgtaattccttcacctcttaccttcttcagttccttcaccgaaaaggtattgatgcattcttttatgggaaactccggcgaggcaaggacatctctgttgtctttgacaggattgagcaatcaaaaatgtcgattgtcgtcttctcagagaactatgccaactccacctggtgcttggaggaactctggaagataatgcagtgtagggagaaattcggtcatggggtcttacctgtcttctacaaagtcaggaaatctgatgtggagaatcagaaaggtaaatttggagctcccttcctaagccctaaggagagtttcaagggagatgggcacaaagttggggcatggaaggaagctctgaagattgcttccaatatcctgggctatgtacttcgtgaggaaaggtactaagcaaatctagcgttgactttctttggaattgtagtcaaccctgaaattgtgatattattcttatgatgcattgacgtcttgtacattctactatagaaattaacaagattgattccagtgttctgttttgctttcagctaccactgattcagtttccttaaatttgtaactgtataattttaacttggttgaactttaatgtgcaggccagagagtgaatttgttgaaaaaatagccaaggaaactttcaggatgctgaatgatttgtctccatgtgaaatcagtggtttcccggggattgaatcgcgttcaaaggaactggaggagttattgatgtttgataacacaaattgtatccgtaccattggggttctcgggatgactggaattggcaagacgacggttgctgatagcgtttataaacgaaactacc

SEQ ID NO: 193262 - DNA, 289 bp, Arabidopsis thaliana landsberg
atgatccaaacgctaaaccatgccaaaaatggcgtcgacattttttcaggaaccaaggtaatgatctttaatgattagttgattactttatcacaagcaacactcttttctgatcttgtataacaacttttggttattttaggtaaggacacattttgggaggccaaaatggaagaaagttttatcaaagattagcaccaaacataggaacgcaagaattggtaacacacagaaacatcagttcactgaaatgatattcgatatcgcggtgtatatttgccttgtctga

SEQ ID NO: 193263 - DNA, 350 bp, Arabidopsis thaliana landsberg
atgaccgagtacaaaagagaggacaagcatcatgatctgaagcaaaatcccgactccggcggcttgctgctgcttctcttgaccttgcgggtcgtgaatcgccggcgaaatctgcagctccgacgacattacgcctcgacggatttaaaaaaaaaactagggtttctatcagtgttacttcgtcttcttcgtctttgttcacacagagagagagaaattcacgaaacgggaactcgtgagatagacttcttcttcttcttcctttccgaggacgcattttgctttttataggaatctgcgtccccactgcttctcaggtggctttccgttttgggcttttatgggcctaa

SEQ ID NO: 193264 - DNA, 120 bp, Arabidopsis thaliana landsberg
agtacctaaccggttaaggagagttaatccagaggcatacactcctcagatgcttctcatcggtccacttcaacattctaagaaagctaatgcccttgagctttccaaaaccgatttaag

SEQ ID NO: 193265 - DNA, 1183 bp, Arabidopsis thaliana landsberg
tttgccaggtgaaaccgatgacaacgtctgtgaaactcgtccatcagatgctgatgttagaagcggagagtcattgggtgcacatggagcaacttctcatgggcaacattttgaattgtctgattctaatgtagttgaagcaacaagtagagacatagcagtcgtagagacacctgatgtagcttccctaacaaaagatctggatcaggcactgcatgttcaaaagctgacaagggaagaaagagatttgtacatggcaaaacaacaatccttggttgcggaaaatgaggcacttgataagaaaataatagaactgcaggagtttcttaaacaagaagagcagaagtcagcttctgtaagggagaagttaaatgtagctgttaggaaagggaaggctttggtccagcaaagggatagcctgaagcaaactattgaagaggtgaacgctgagcttggtcgcctgaaatcagagattatcaaaagagatgaaaagctcttggaaaatgaaaagaaatttagggagttggaatcttattctgtgagggtagaatccctagagtctgagtgccaactgttgaaaattcattcgcaagaaacagaatatcttttacaggaaagaagtggtaatttgagcatgacgttgaatgcgttaaatagcattgatattggtgatgaaggtgacataaatgatccagtcatgaagcttcaacgaatctcccaactgtttcaaacaatgagtacaaccgtgacttctgctgagcaggagtcgagaaaatctagaagagcagctgagttgctacttgctgagttgaacgaagttcaggagacaaacgatagtctgcaagaggatctatcaaaatttacatatgaaatccagcaactttccagagagaaggatgcagcggaggctgcaaaggttgaagccatatctcgttttgaaaatttatcagcagtcagcaacgaagaaaagaataagctatatgctcaactgctatcatgtggaaccagtgtgaactctctaaggaaaatactcgcaggtaccaacagttgcctagctgatattttcatcatggatatggagtttctgcatcatctgaaggcaaatatggaattatgtgcgaagaaaactggaactgatttgtctggcttgcctcaactcagtacagagaatctggtagacaag

SEQ ID NO: 193266 - DNA, 46 bp, Arabidopsis thaliana landsberg
atgaagggtcttcttaagggccttcgttacattactcagatttttg

SEQ ID NO: 193267 - DNA, 84 bp, Arabidopsis thaliana landsberg
ctagagctcatcatgtacacgtacgttgataataagccgccggaccaacgaagactcgctaaagaactagatcttcaagcctga

SEQ ID NO: 193268 - DNA, 264 bp, Arabidopsis thaliana landsberg
gcgcgcgtcgccttgaattaccgcagcaaggagctgataagcaccaactggcttggcgtgtcgggccttgacgaatacctcaagccgcaggcgttcctggcggcaagcgtgacgtacaaggtgaattcacatctgcagctttatctccagggccagaatctgaccaacgagaagcagcagtattacctcacctggcccgaccagagaatttccacgggattttccgagcgctactacatgctgggagcccggctgcatttctga

SEQ ID NO: 193269 - DNA, 143 bp, Arabidopsis thaliana landsberg
atggctacaccaaagcccttgaatgtattaagcaccatagcaaaaacgatgcaaataaaaggcagtgcaatggtagttgagccagaacctaaaggacggggctctacacaaatctccaaactaagtagctttgttcgggtcac

SEQ ID NO: 193270 - DNA, 1011 bp, Arabidopsis thaliana landsberg
aaccccggaacaaaaccaaaacaagccaatggagaagaaaaagaagaagccaacaaagtgttgtcttctaatgtgttttggaaataagagaagcaagaacgcaaagattgagcctatggcgataccaaactggcaatatcgaggagtaggaaatgaaaatggcaatgccaggcctttcattaacgcggcaatgtcacctccaatggtgtatcctcctccacaagcagtgcctggcttcacaacacccataccataccctcctcctagtttttttccaggaagaccaccaccatacactggtgctggtatgttccagtcagctccaccacaatccccaccatattttccagttcccaaccctaggctgcattacccgcaccactgatacagttctttcagacgatacattcattgcctgtttcttctcttagctatgactcaaatgctgagtaataataagatggtaaattcttttcaacatgtaaggtatatgaagaaatgcaaatgaatgatttccacaataaggcagactagaaaacacatatagacaattaacttgataaacttatttttcggccggactcatgttttaaatgataccaaaaataaacatatcttgttgggaaattagtaaatattttatcaaatttattaggattttttatagaaacgtatatattatttagtgtagacaatagagagaaacaaagaagtggttaatacttttattgagataacgcgttgaaagcttaccaaattttggtggattacgaccaaccacccaaaaagatttttacgcttgactaagtcctggttctctcttagtctctaccctttgctatcaaacattcagtctgaatctgagattaacataattatggcaattaatggcactcaaacaaaaaacacgattgagtcaaaaacaaaaaagaaattcctagtttgatttttatttatggttttgacttgagagggattttttttgtcccaacagagaaacgaacattgtga

SEQ ID NO: 193271 - DNA, 590 bp, Arabidopsis thaliana landsberg
ggtgggaagtcaaatgattctacgggtgccaaacaatatacattgaagaatattcttggtgacgctttaggctatgggccacagctctcagagcacattattctggatgctggtctagttccaactaccaaactttcagaagacaagaaattagatgataatgagattcagttattggttcaagcggtgatcgtttttgaagattggcttgaagatattataaatggtcaaaaagttcctgaaggttatattctaatgcaaaaacaaattttggcaaatgacacgacttctgaatcaggaggtgttaaaaaggtcactattttactctatgcttcttcatttttgtattgtttaatggcaatggattttatgtattgaattttcgtttgcctggttgcctacagatgtatgatgagttctgttcaatcttactaaatcaattcaaatcaagagtgtatgaaaagtttgaaactttcgatgcggctttagatgagttctacagcaaaattgagagccaaaggtctgaacaacaacaaaaggcaaaagaagattctgccagtgtgaaactcaataagattcgccaagatcag

SEQ ID NO: 193272 - DNA, 142 bp, Arabidopsis thaliana landsberg
atcccgtgagaagaactcaaaggctctagggtttctctgtgattcagttaactcctttagatatcgtaagaaagtaatcgatgatactattgcagtcacattcaaggtttcttcttcaaacgctattgacgcgagctcaaaa

SEQ ID NO: 193273 - DNA, 342 bp, Arabidopsis thaliana landsberg
atgaagtatagtaacagcagagaaaagctaaggttagatgatgtgatggttggagcgagagataaagaaagggaattgtctcagaacaataggcctgtagcagaaggtcattatgctagaggtaggccagaaggaaagaacaacaatcaaggaaataagggaaagaataggtctcggtctaagtctgcagatggtaaaagagtttgttggatttgtggcaaggaaggccacttcaagaagcagtgttacaagtggttagaaagaaacaaatcaaagcaacaaggttcagatgttggagagtcgagtttggctaagtctagtgaaatatttgatcctgcaatg

SEQ ID NO: 193274 - DNA, 140 bp, Arabidopsis thaliana landsberg
cacactactttctttctctttgtttgaagccaacttcagcacactcctaccgaagcaagttcccttagctgcccttcctgtttcctcagctttaagtcctcctgttccggcagttcacctcttcgtgttccgtctaatag

SEQ ID NO: 193275 - DNA, 341 bp, Arabidopsis thaliana landsberg
tgctattataattcaatccccaatctttgcggttgatcttaccctggatgctgaaagccgatcttacatttccccagggatcacgtaccgtacccccaaattccacgccgagctttaccggtttcgttacatctttaatcgtcaagttaccttccagctcataatcgccttcctcatttactttactaaaacgggtagcgacaaacttcatttcaggatattgcgctgcatcgaaaaaatctgctgaccgtaaatgcttgtcgcggtctgccggcccggtagctacagaattcgtctttactactgccgttattttcgcatccacaaaatcttctccctga

SEQ ID NO: 193276 - DNA, 314 bp, Arabidopsis thaliana landsberg
atgcaggcagtgcgccttggaacttcgcaactatttgaaggcccctggtacaaaggctccttgccccgaaaagaagccctgtccgattatgcttgcaaatcccgactgcccacagcaggtcgcgtctccatttcgaatagctccgcaactttccggtctgcacaacagtgagcgcatccaggccgctctcgataaaattatccatcacaaggcgattcaagcactaagaaattgccagaagagtctggatcatgcggggcctcttaaacctataccgaacctagacttcgttgtcgccatgacactgcgtgact

SEQ ID NO: 193277 - DNA, 685 bp, Arabidopsis thaliana landsberg
gcttcaggatcaaggtctgtctccaaagaatatcttgcaactaagaaaggcactggcgcagtatttcgaatcaaattcattcaggctaggaaggaatgggtcggagttagctgagccggtttctgtcgtgataccatctaaaagctcgagaaaccagcacgagagttatcaattagcgatgtggaaactaagggatcatgtctgtctctctccctcttcatcctcctctttctatctttcagacttgtgaattatccatacatgtgcacattcatccacatgaacacgctcaagaactagtgttcgggtttatcacaggttttgtcttctaaatctacgtccttttcaagaccagtctccgaacgcgaatggctgaaaaactcagcaaagatatgggagatggtgaagaattctccgatcattgcggagtaaggtaggacgcttcaaagttccggtatgtttcggaggtagaagaccttaacttatagtcagtgtcttcatattgtagacttgctcatttgttggtcaaaccagacttgcctttactgaattcgttgaacttgagatttcaagttcttaaagaatagtgtcatgaatatttttaattacagcaaaatctctctgttgcttacattctccctctgaatacagcaaattgcgtttaagttttctcttcgaaagatga

SEQ ID NO: 193278 - DNA, 239 bp, Arabidopsis thaliana landsberg
ccccctctcaaccactcgtcctcatcgttgccatctctcatcaaactgccaccgtcttctcttcattcaccgtttactcgaccaaactgcaactgcaatccaccaaacaagcctcgccaccattcactcgaccacgccgttaccgtctctcattcactttcactcgaccgcaaaaccgcaaaactcgtagccacaatttcaacgtactcgaccggtttactcgaccgtgtctcatgtag

SEQ ID NO: 193279 - DNA, 241 bp, Arabidopsis thaliana landsberg
atggtacttggaaactcctccagtcacaaatctcatcaccatcaacatcataatcatcatcaccgggactcgatgaaggagttccgagctgtctttgcagccgaagaaccaatccagggcttcgagtatgcagatatgaggaggtcaaagagcgagaatatgggcactagagaggttgcaaaagcagaggatgttgacaaagaagctgagcaattcatcaagtttgagcatacgaagttca

SEQ ID NO: 193280 - DNA, 224 bp, Arabidopsis thaliana landsberg
aaccaaaaacacttgttgaagccaaggaaaagtcacttcaattcatcgtctggatcgtacgatcagtctaccttcctttcatcggacggtccacatttactccattttccggtcgccggcttaaagaacgatttcgattcaaccggagggaatttagtttttttattaacgttcaaattttttgctttaaacgtacgtttcaaattcaagaagaagctttaaag

SEQ ID NO: 193281 - DNA, 148 bp, Arabidopsis thaliana landsberg
atgaggcttttaacactaaaaagcccaaaccaacggtatcgggtattatcacctaaacccaacccattaaagacaacgcgtagcttcacgcgctacacgattcgcgtgagaagaactaaccctgaaacgcggacgttgcagataaacg

SEQ ID NO: 193282 - DNA, 1190 bp, Arabidopsis thaliana landsberg
taataaacccaaagtttttccgacatatcttcttcacaaacatcacatatgaactttgcaccggtgtgttgtagagaagagtgagtggatgttcgtcatcttcccgctccacagtctcaggggcctttgtggacttaaaaaaataaataagtgaaattccaaagggagataattaaaaatcgatttggtataagaaaaatcaaccggtatggtatgagagaaccaaaatcgagcggtcgttaataattagaacgaaaacagaacaaagattgcgaagagaaatgatgatgatcagctcctcctccattacatgatccctttctcttctgtcttcatctcctgagaaattgcccctcagaaaccctatccagagatgcccaattacttactccggcttcagaacggcgagcgtgaacagagctatccggcggcagaggcagagtcaagccgtgtccgccactgaatccagggtttctctcgtctttgctctcgcctctgaggcatcctctgtctctcaacgccgtaaatgttccctctttcttcacttgctgacactttttttgtttgatttgactattgttttgcttttaattctggatgcttttgttttcgacagaacacaataaacgaaaaaagacccctgttgttactcgtaaagcccaatctgttggagaagagattgaaatgactactcgagtaatagctaccaaagtaattatctcatcaatggatcctggagggtttctttttggaagttcttagcttattttaacctagatagcatattttggagttgtttcgagtgagttggtttcttctttttttattaccagttttagtgaaaattgttctccataggatcatcacactcttttgctctagatcttgaagagatcaatgaatgatagtgtatagtattatttcttcatatgtaagtgctgggaacctggtattcttgattgttacttttctcttacaaaattgcaaattagttatgtttcgttttcttaccatgttcttggtcctcgtcaattagtatatttgcatgcttcaggcaaaaaatcaaactcagtggcggatgtcttttgtcatgccctcaaagtatggttcgaattttccattgccaaaagattcttcagtcaaaattttggaggtgccacgaaagattgttgctgttgtcgctttctcag

SEQ ID NO: 193283 - DNA, 156 bp, Arabidopsis thaliana landsberg
atgggcaatatccgctcgacgatcgaaacgctctgccagggccgcgagtgcgtcgagaacacaaaagacctaatcaaagcattggagtccctaaatgactttaaaagaccagatcaaaaaagcacaagccggaatgggcacaaccccagacggcgg

SEQ ID NO: 193284 - DNA, 237 bp, Arabidopsis thaliana landsberg
tttttgagagtatgggataggatcgaggatgcgcctgtgaaagctgatgttgcgctcggtaataggtactcggttgaaggtttaaagaagatatttgatactgcgaggatgtgtataaaggcagagagacttgaacggcctaccatgagtgaagtggaagcgatggttctcgaagctgcagctttcccggtccaagtgccgcgccaggtgacaaggaggcgttcggcttcaacataa

SEQ ID NO: 193285 - DNA, 121 bp, Arabidopsis thaliana landsberg
acgggcagatatattagttcagcagctggagaatctcggcactcaccttaatccgcggctacagattcttcctcatcgaaccaccaagaaaatgttgccatcttcatcctcgaaatgttga

SEQ ID NO: 193286 - DNA, 69 bp, Arabidopsis thaliana landsberg
atgccgagcggaacaggctttggggtgctactggcgctttttaacaacattctacgcgccgaccggcag

SEQ ID NO: 193287 - DNA, 125 bp, Arabidopsis thaliana landsberg
gagctgaaggatttgttgatttggatgtcccaacctcatatgccagacgtcttcagatgttgtttgttgacgagaggaatagaaggcatgaacagatgaatccttcagaacatacagaccattaa

SEQ ID NO: 193288 - DNA, 70 bp, Arabidopsis thaliana landsberg
atgaaggaaggctcgagccgttggactcgtcgtcatcgagctattcattgtctagactctagagagagag

SEQ ID NO: 193289 - DNA, 68 bp, Arabidopsis thaliana landsberg
aaaagaggttcaaaactttgaaggttggatataaagacctcaacgactacacctatcaaaacctttga

SEQ ID NO: 193290 - DNA, 70 bp, Arabidopsis thaliana landsberg
atgcagtcagcttgtcaattttctacaaaagataagaaggaacaaacccaaaaactggatccctatgatc

SEQ ID NO: 193291 - DNA, 117 bp, Arabidopsis thaliana landsberg
ggtcacgaatctctgaaattagtggttcagacatttcatcgaacaccttttgggcgcggaaatgtctgggctcaaattccagttgatcagaaagcaataggcattaagaacaactaa

SEQ ID NO: 193292 - DNA, 376 bp, Arabidopsis thaliana landsberg
ggccgcatcgccagcttccaagtcggcgacttcctgtgcccgctgcccgccgacgtgctgctcggccgggccgtcatgggcgacggtgtcatcgacttcggacccatctgccgcgccgtcgcggacgccgggtacgcgggggacgtcgaggtcgagatcttcaatgcggacgtgtgggccgccgaccccaacgacgttctcgcgcgcgtccggtcccggtacgccgacctcattgccggacacctatcacccggcgatcactgaccgcggattggcgtccctgcccaggtatagcacgaccagcacttgtgtcgctgcgtggccactcggtcatcgtctggcaatctccatcacttcgcatcttgtcgtcatgtaa

SEQ ID NO: 193293 - DNA, 167 bp, Arabidopsis thaliana landsberg
acgaattgtgggatgaaattcaagatctggatctaggtcctgaggatccagccctcttcattccccatgaagcttatgtgtatgttgaagagttcaatcgactgagtataattgcaagacctctcaacccaagagtccaaaacttaaacgcggtgattgcagcctaa

SEQ ID NO: 193294 - DNA, 267 bp, Arabidopsis thaliana landsberg
aagcccgatactccgtaccgaaaaccaccgacctctggaacaaagccgtggaattgaccggcgacgaagccctggggctgaaggtggtcaaacacatcacgcctgccacctttcacgccgtggggctttcagtgttggccagcgaaaacctggagcaagcctttcaacgcatgagccgcttcatcgacctgatcaccgatgcaagccagatgaagctgggcttcaacgcccaaggcgaatttgaggtggacatactgctgcgtgaag

SEQ ID NO: 193295 - DNA, 690 bp, Arabidopsis thaliana landsberg
atggatcaagatcatgagttatggcggacgctaagatgcgccggtaaagcgcaagataagacctctgttgatactctcatgcttaagtaccgtccgatcgctccaaagccgacgactactggtcaaccattggtcggagatacaagtagcacgagaaggacgaagagaaagtacgttagggtttcaaagaataataaagccacgtgtcgatcaaagacgaacggcttcagatctagctcaacagatccggagaatggtcgggaagatatcgtcacgctacagctcttaccggagagatctacgccgttgagtttagatcataataatctcgatccaacggtggaaacgataaacggagatgaaacttgtaataccgacacgtggctcaagtttaacggcggtgatgacgcgttgcaacaagttccggtagagacgtgggtgacggtggagtccgttaacggtggctcggtttcccatgcggtagggttaacggacgaagagctcacatatgctttagataaagacacgtgtcctggtttcatatcggatggttcgaaccgtgtggtgatggttaacgaggcttaccggaggatagtaaccggagacggcggattcggaagagaggtaatagtgtggttggtggttgaccaaacggctacgttttgtgactaccgaacttttacgtgtaag

SEQ ID NO: 193296 - DNA, 144 bp, Arabidopsis thaliana landsberg
ggcacctcctagagtgccacaaatgtattgcacccaaacggactgctctatctcgcattaaactacctggatgttccatcttgcaacccagcgccgccgaccaaacgactcaacgtcgacgccgtggtcggccgcagcaggctg

SEQ ID NO: 193297 - DNA, 291 bp, Arabidopsis thaliana landsberg
gagagtctttgacaacaaatccaaggtcaaatatgttccaaaaccatcaaatcatcagccgaacaataattaccgtcagcaacaacagaacactcaaaggatacactttaagaaagacccacatgagttctttgcagtagcgagccatctgtttccactagcagacatcctcccaacttaccctctagcaatgctaacactttccctggtaatgtcatgactaatcctcagaatcaaaatcacttatcctcctcgacctggtcctttccctcctagataaccttaccctaa

SEQ ID NO: 193298 - DNA, 192 bp, Arabidopsis thaliana landsberg
atggtttggactttggagagaccaaaaaaaacttggaagaaaatattcatggccaagaacaacgaggataaattccgaagagaatacataacgaagccagtaaggtccgtctcttgcgatatatgattgatgtcggccttccttagtgacactgctagcgcaactgtgttgttgctttcggtccacagatga

SEQ ID NO: 193299 - DNA, 101 bp, Arabidopsis thaliana landsberg
atggtttatcgagaatggatagagattcaagagaagattgaagaactgagtttgcaaaggcttatcaatgccttcgacttcgagttgagattgaagaaacg

SEQ ID NO: 193300 - DNA, 104 bp, Arabidopsis thaliana landsberg
ttatgtgtaggagattttgggacaatacgcgcacaaatatccttgaggagaggagggaaaaacggattcaacggaaacatttggggccaacagttggcatctaa

SEQ ID NO: 193301 - DNA, 209 bp, Arabidopsis thaliana landsberg
cttcgataaggaggagaatccagatctttcagatctacaaggccaggttctctgcttcatcttctccggcgaaaaataccaccgtcggtttcaaagaggggtaagtaaacgattcgctttttttttttttttccgcgtatgtgccgagtaatttattttacccttttgttttttagttatgtggttatgaagatcgggcggttatgtga

SEQ ID NO: 193302 - DNA, 297 bp, Arabidopsis thaliana landsberg
actccctaccacgtgatctctttagtgggatactataatacaaacaaagaggttaagacacgaaaatacaagcaaaagggtaagccacctataatactaacaacaagggtaagccaacctaaacaaaaagggtttgtcctataggtcaatctacctaaactctagcaagtgactgaacaaatttcctaatagctttttgcgacacatttactcgataaaacattgaaaaccatggtttctcgtagcgtaacaaaccatgctgtgataccaccttgtaacacccctatcccgctataa

SEQ ID NO: 193303 - DNA, 329 bp, Arabidopsis thaliana landsberg
atgcatcaaatcatgtcggcattatcacagaatcaagtgttgcagttagttcctggcatcgcgtcacagtatgttctaggtcgtaaatgggttttaagagtgaaggtaaatgcattctgggtcccttaaaagactccaagcacgtttggttgcattaagggtttatcatcccaacatgaaaatagtaagtaggtttataaaaagtatctgttcggatagtaggttagggctctcttgctctatcaccaccaaaatcccatccttagcttatagtagagttgccagagtcggatgaaccccaggatgtgtgttccctgtttataatcatg

SEQ ID NO: 193304 - DNA, 65 bp, Arabidopsis thaliana landsberg
atgatggagctagtaaacaatggatattacgagtcccttcctttcactgtcgatggattcaactg

SEQ ID NO: 193305 - DNA, 148 bp, Arabidopsis thaliana landsberg
atgcaccgggcgcgtggcgatcgacccggtcacgtcctgcgatggagcgtggcggttcgatgcataggggttggaatcgaagcggcccgaatccgcacagccggcggcggtcacaccgaccacagcgaggattgcgaaacgcggccag

SEQ ID NO: 193306 - DNA, 280 bp, Arabidopsis thaliana landsberg
agaatacctgtagccttcttcttgaagaatatagaaggaagatatgagcagaagacggcggagctgagatcagatgcgtcaaagataacttgggaagtgaagatagatggacagagactcactgacggttggaaagagtttgctctctcacatgatcttcgaatcggtgacattgttgttttcagacaagagagagatatgtctttccacgttacaatgttgggacctagttgttgtgagatccaatatggttcgtgttcagacgaggagagaaacctcg

SEQ ID NO: 193307 - DNA, 452 bp, Arabidopsis thaliana landsberg
atgaaacaaatccctcgaaccacgacatcgttttctgcgacccatgcaaaacgtccgaaacgccgggtgcttattgatcgccgcaacgagcagcgaacaaggctgccggcgtcgaacgcacgggagcctcagatgcgcacgttcagctttctattcgccttcgcggtgtttctggttggaccttgcatggcagggtcgtcggccgaacacgcggcacacatcggcaccttcagctacagcggcaccccggtcgcgggccccgcgaccgcgctggtgatggctgcgcggtgaactgtactagctaggctgcctcctcaattcccaccaccagtcgcttgccgagcaccagcaacgctgccgtcagcggtgccattttggtttcatgctttggatcgagcagccgccgcacgaccttctcgttcttgccaagccgttttgcgaattctgtcttg

SEQ ID NO: 193308 - DNA, 452 bp, Arabidopsis thaliana landsberg
atttttgaagcctgtgtctggtcacactttggtaaacttctctcgtttgatacacactggacgcggtgaggaagacgagccttgtgtgttgggattccacgaaagattggtgtactatgtggtagatgcacaagaaaaagaatggagtgttgttgtacatatccaaccaagagacttgtataatatggaagattctactagttcagatgaatttcctcctcaagtcatcattgaagatcctcctgttcaaagttcaatgattatatctgataatgttttcaatattagattaatgaggcaaatagaagatcttgaaagttctcacattccatgtgatttatatgataacatggaggtgattatatttgttgattatatttgcttggtttttgcttggtgattatgacttcaatattattctaacaactatgtttctatctttgtaggtttaa

SEQ ID NO: 193309 - DNA, 68 bp, Arabidopsis thaliana landsberg
atggatggcacaaggatgggccttgttccacatcacaaagctcttggcaagtatgttcactatttttg

SEQ ID NO: 193310 - DNA, 102 bp, Arabidopsis thaliana landsberg
atgaaaattcgatttgttcatctacggttagagtctaatattcgtattaataccatgcaggtcacactcacacaaatagcacaacaagtggtgaaacactag

SEQ ID NO: 193311 - DNA, 199 bp, Arabidopsis thaliana landsberg
atgagagtttggtttttgtttcttgatgaggaagtgaagaaggaaagggaaaagaaggatggggaatctgtgaccttggagaagtgtttgagtcaagatacctcggcgtgggtcaaggtttttgtggaggaggtaatagttctcgaggagtctagcgatgcattgacctgttacggcaaggatggtgcatataatgatg

SEQ ID NO: 193312 - DNA, 30 bp, Arabidopsis thaliana landsberg
gaaagtgtgactgagattgaagagtattga

SEQ ID NO: 193313 - DNA, 52 bp, Arabidopsis thaliana landsberg
atgtggatgacggatgaaacagagatggctttgcgtttgaaggtgattgaag

SEQ ID NO: 193314 - DNA, 317 bp, Arabidopsis thaliana landsberg
gttatcttcctccgccaacattcaatgctgctgaggaaggatttggtggagttgctactgcttcaaccggtggtgcagtcgccactgctatttccgttggtgaagtccctactgcttcttccgctggtggactcgctacggcttcttccgatggtgaagggcttgtttcaagtatcggaagggcggggattgacttaaatgccgatccagtcgaggaggaagacaaggtaattggagttggatataagcgaaaatttgatctgaataggtcccccccaccagacggtgatgaagagaacgatgataaagtcgagtga

SEQ ID NO: 193315 - DNA, 1026 bp, Arabidopsis thaliana landsberg
aaggcttgagaaagaggttgatcgagcaagccgaagcggttttatccaacaaatccaagagggttgagatgcatcgcccaacaaaagacatgggactagatgagtaagcgtaatagtgggaaggttcagactcgttatatgttcacataaaagagtagaggcgtgagcagcgtcacatggcctacgtttcgagatcaaaactattccattaaacttcaaaactaaacttgcatctgggacaaccaatctactctatgcaacatgtttcgagagttgtaattgcaaggctcctctaaaaataaagttccaacgattgaattgagtctacaaccatccgttatcgtgaagcagtgttttagagagagatcaggcaaagttctaaaaagatcaaacctagatatgggttaaattaggtttagagttagtggacagccgagcggagtgaggcccagcccaccaagagcgaagattgttgcatttgggcggtcaaaaggattaagtcccatcccaccaaaccctagggttgctgcggttgggagaagggaagaaagatcaatgtcgtcgtgtaactctgagatgatggtcgacggtgaagcacaaggggaaccacctgccagcaaaggagctcgtcgtgtgtcgtcgatgttcttaccggaaaaagcaccactgatggtccaagagattttcctgccatcaacgaaatccggtgagaagggactaaaggtgttgtcggtgctattacaaatcgagagccaattgatgtgttggtgaaggactgctctggagtttaggagaaaacggtggtggagtattgcgaatcttcttttggcgggttccaagacacagctacgtccgagggatgattgggggcagagctggtagagtatcgattcactcttccgtcgcatagaggacccacagagaagaagacgcttagggaggaaaattttggatttttcaagaaagaaacgcttaaagaagaagataaaaggaaccaaaggattgagaagaactgaaaaagattaa

SEQ ID NO: 193316 - DNA, 398 bp, Arabidopsis thaliana landsberg
ccaccttagcaacgtccaccgctgccttactgacagcttgaccggctttagtctcacgtgcaataagacccaaaccaacgaatacgagaatgccgccgccgagaatcattccgacctgagcccaagtttcccatttcgtcagcttagatatgaattgtttagctccggaaccaaccggatctagtaggctagcggtttccgccgtgcctaccgtaatcgggttggttccggagacttgtgtcagtaatgccgccgcttgactttgcgcttggtcgtacttagccggatacgcggaaacctgtaccgcttgcacaatctgtccgtccgtacaatccgggtgcatcgcttcgtgactctttgcgcgggtcacaaaagacacggtggcagtctgtacattg

SEQ ID NO: 193317 - DNA, 98 bp, Arabidopsis thaliana landsberg
gaacagataagagacatttggcaaacttcaccgacttgagtggcctatgcgtcaacgaagtccaccatgctactggcctgccatatcggatggattga

SEQ ID NO: 193318 - DNA, 125 bp, Arabidopsis thaliana landsberg
gcatcagatttcttgcgctacagatctcaacaatcagcttcctcagaacattgtctgccattgtttccttctcggagataattgaagctgatcagatttttcttacgattgaagaagatgaatga

SEQ ID NO: 193319 - DNA, 156 bp, Arabidopsis thaliana landsberg
ttttcaggcatagaggacatcattcttctcgtagtgatgttcggctacgacagtttaaaaatggaacaccttaagtcgtgttttaagcacctagcaatatatctattgagtttcgattacaagatgataatctatgttgctattgtagacaattag

SEQ ID NO: 193320 - DNA, 186 bp, Arabidopsis thaliana landsberg
atgtcttctgtttcaagccagccacagtttcgttacacgcaacctccttcaaaggttcttcatttgagaaacttgccatgggaatgcactgaagaggagttaattgaactcggaaagccttttggtactgttgttaatacaaaatgcaatgttggagctaatcgaaatcaagctttcattgagttt

SEQ ID NO: 193321 - DNA, 262 bp, Arabidopsis thaliana landsberg
atgttggttcgctctgcccggccaaccctagcctccattcaccgccttttctccgccgccgccgccgcgacggtggacacggcgacggcacccgtggtgaagactcgcagcggaggaggaaaaggaggagaatcgaccaacaaaaaagaaactgtagttggaggaagagacactctaggagggagattactaagccttgtgtatacgaaacgcagcgccgttgttactatccgtaaatggaaagaagaaggccattccgttc

SEQ ID NO: 193322 - DNA, 53 bp, Arabidopsis thaliana landsberg
aaaagttggagagtacgattgatctaactgttcaggaatgtgagagcaaataa

SEQ ID NO: 193323 - DNA, 215 bp, Arabidopsis thaliana landsberg
aggcatttcaaaatcatcagaagttaagcgctcgaaagctcttccctgagatcgaggaggaacacataaggcatgcactacacatacgtcaaggtggtgttaagaagaccagagccgagagcagtaaagccaaggcaaagcaaccatcaccagctaggtttcagaaactcgatgttgggatcagtttgcgttctgatgcagattctgaagcaaag

SEQ ID NO: 193324 - DNA, 558 bp, Arabidopsis thaliana landsberg
ctgtgtataaagttttgcagtacattaagggtacagtgggtcaaagccttttctactctgcagattctgatcttacattgaagggttacacagatgcagattggggtacttgcccagatagtcggagatctacaactggtttcaccatgtttgttggctcttctctaatctcctggcgctccaagaaacaacccactgtttctcggtcatctgctgaagcagaatatagagcattggctctggcttcttgtgaaatggcgtggctgttcactttgcttattggctttgcgtgttcattcaggtgtgtctattctatactctaacagtactgccgctgtgtatacagccactaacccagtgtttcacgaacgaacgaaacacatcgaaatcgattgtcacaccgttcgtgagaagctggataatggtcagttgaagctgcttcatgtcaagactgaagatcaggttgctgatatccttactaaaccactcttcccttatcaatttgctcatttattgtccaagatgagtatccaaaacatttttgtattctcatcttga

SEQ ID NO: 193325 - DNA, 176 bp, Arabidopsis thaliana landsberg
gcaatactctcaacgtgttgatgtgcgatacggacatggcaattacacaacttgttttcggatccataagagcgcctaaactctatatcgcttccaattcctcggagcctaactcttctcatggtttttgtttcaacattatagtagaaaatgtagaaggaccgaacatcgcgtga

SEQ ID NO: 193326 - DNA, 267 bp, Arabidopsis thaliana landsberg
agaatagatctgttgtcactgacatcaaccgcaacgttgctgccactctcaaggcttgcggccctgcagtcctgactgccaaggatggcatgctgcaagaggtcatctccgtcgttactcttctcatcactcgctctcacccttgccagctggatcttggcgatgaggatgaggagcaagaggttgaggatgccggatcttcagagtatgactggcttgcaattgacactgctctggatgtcgttgttggccttgccgctgctctgg

SEQ ID NO: 193327 - DNA, 287 bp, Arabidopsis thaliana landsberg
atgatcaagaagtatatagctaccttaacaaaggcggaccagctgctgctgttcgcctgtgactgcaaaggcgtggtggttccagacatgattgctgatcgacgatgtccctatacgaaggaagagttgtcaaggttggatgtagggttgtcacgacaggacagaagattctgagaaacggtctcgtgtggttgagcgaggggcccgatcgcgggactgcggggttggtggcagggaagaacagcaagtcaagacggagcacgcggggcactttttctactccagct

SEQ ID NO: 193328 - DNA, 159 bp, Arabidopsis thaliana landsberg
atgagcgagagattatgggtgaggtgtcttcccataagactgcccaagaggtggatgttgtcgataccaactctctttttctggaccaacttggtgggtgtgtctaccacttggtcctgtgccggagtcggggtgtgaagggcaatctgccggagaaag

SEQ ID NO: 193329 - DNA, 1102 bp, Arabidopsis thaliana landsberg
atgtttcctcaacttgccggtagtgacacaattgagagcctattttggatatttaggagtaagcttgaatgggacgatggtgaaagaaggatcaccacatttaagctaatcaaggctctcttcctctcagtgtggcgagatattgttttgtcagctctgcttgcttttgtctacacggtgtcttgctacgttgcaccatatctcatggataatttcgttcagtacctgaatggtaacagacaatataagaaccaaggttatgtgttagtgacaactttctttgttgctaagcttgtggaatgccaaacacagaggcagtggttctttagggggcaaaaagctgggcttgggatgagatcggtcctggtttcgatgatctatgaaaaggggttgacccttccatgtcattcgaagcaaggacacactagtggcgagattataaacctcatggcagtagatgctgacaggatcagtgcttttagttggtttatgcatgatccatggatacttgttttacaagttagtttggccttatggatcttgtataaaagcctcggattaggatcaattgcagcttttcctgcaactattttagttatgctggcaaattatccctttgcaaagttggaagagaagtttcagagcagtttgatgaagtccaaagacaacagaatgaagaaaacatcggaggtcttactgaacatgaagattctcaaacttcagggatgggagatgaagtttctttctaagatccttgaacttagacatattgaagcaggctggctaaaaaagtttgtgtacaattcgtccgctatcaactctgttttgtgggcggcaccttctttcatatctgcaacagcttttggcgcatgtttattgctgaaaattcctcttgaatcagggaagatactggcggctcttgcaactttccggattctgcaaggcccaatctacaaacttcccgaaacaatctcaatgattgttcaaactaaggtatctcttaataggattgcatcttttctctgtctagatgacttgcagcaagatgttgtggggaggcttcctagtggaagttcagaaatggctgtggaaatcagtaatg

SEQ ID NO: 193330 - DNA, 226 bp, Arabidopsis thaliana landsberg
gattcaagaagaattgaagcgcgaaggattgaacgacgaagatgcaaaggtctttttcgggtcgcccgcaaacccgctacatttaatgggcatgtcttgtttaatccgcaatccaaacggatcatacctgctaggcccgctattttttggacttcactacataggcctgtacccaccccactatgttactaaacggaccaggcccgtggacataaggtctggttga

SEQ ID NO: 193331 - DNA, 1003 bp, Arabidopsis thaliana landsberg
atggcaaaggaaagcgcgcacaaggaaggcatggcaaaggaaagcgcgcgcaaggaaggcatgacaaaggaaagtgactgatttggtggctaaattgatgtcacacccggattttaggggtccaaaacccgggcgcgaacataaacaccaagtgtgctgggaccaagtctcacacatatgatgcatagtggcacaggatcgaatgtcacatctttactatataacaggagttctgtacaaaaataattaaataattacatcatatgaggaaacgatccagcaacccaaagttgactgggagacgacggcctagacctctcacgaacatatcacagcatcctccatgcgcctcatcctgcagtacctgatcttgacctgtggggggggtgtgagacagcaagagtgagctcacatacgttcatcgctcaacaagttgtggggaataatgtgcatgaactcgccaaaggtgggagctcacgtgaagtgtaaggcttaccaaagaggatggttagagctgagcattgcttttaaagttggtcaaaattttattagcaattactaagtataagtaaataccaacccaattaagtagtagaacaaaagtaacatcatcacctgcgatgcaatgcatatgacaaattgaatttagttccataaattaatttagttccataaattaatcatcagagagtcctgagctgctcatgaccgtgagctcggctagtataccagttttacactctgcagaggtggtaccctttacccacaagtcatgttacccatctgccaagggattgcgacttcccatacacctctaccgaggaggcgaggcagggtaacactacgaggcctttacaaagttccactagcttcagaaaacccgctacagtttctaggaagctctaatgcagggacccctcgcctgactgccatcgcagcaaaatcaacccaagggcctccctacactgaccactcccctactgcccttgcccctttcgggtaa

SEQ ID NO: 193332 - DNA, 147 bp, Arabidopsis thaliana landsberg
atcctatcaagtgatgatgaagacattaaagcggaagaagaagaggtcatacgactacgggcagaacaacttggatccataacagcagctgatgctgggttagacgatgatagtgaagaagatagcgacagagaattaaccatggag

SEQ ID NO: 193333 - DNA, 173 bp, Arabidopsis thaliana landsberg
cctcgggcaagggcagccgaccccggaggattcacgtctcgcccgagggcccctcaagcaacggacacaccttcggctcgcccgaggcccagtctttaccgagaagcaaccttggccggatcgccacaccgaccgaccgtatcgcaggagcatttaatgcaaggatcgcctga

SEQ ID NO: 193334 - DNA, 615 bp, Arabidopsis thaliana landsberg
atggagtacgatggacggagaccctactctgttctaacgaaaaatgaaattaccgtaaagatgaagaaacagatcaatgaaatctctgacatcttcttcatatcaaactccgatgcgaccgtacttcttatgtatctccgatgggactcgcttcgtgtttcagagcgtgtaggtgaaaacaaggagaaattattgatggattcaggtttgaaatcagtcatgatcgatcccagtccagattcatctagcgagattagcttggagactgatgtttatgagtttgatggtgataatgatttaatctccacgaccttttgttctcacaagttcgactcaaaatattggagagagtatcttgagaagaatttctactatgtggagaaaatccaaaccacaatctcttgtcctgatcaagattgtcgatctgcggttggaccagacacgattgagaaactaacagtacgtgatcaagagatgtacgagaggtacatttggagatcttacattgaaggaaacaaggtattgatgatcaaacagtgtcctgcacggaattgcgattatgttattgagtttcatcaagagaatgatgatgatgatgagtatagtttaaacgtg

SEQ ID NO: 193335 - DNA, 322 bp, Arabidopsis thaliana landsberg
atggaggatgagcctagagaagccacaataaagccttcttattggctagatgcttgcgaggacatctcttgtgatcttatcgatgatctcgtgtctgaatttgatccttcctctgttgctgtcaatgaatccactgatgaaaacggcgtcatcaatgattttttcggtgggattgatcacattttagatagtatcaagaacggtggaggcttaccaaacaatggcgtttctgataccaattctcaaatcaacgaggttactgtaactcctcaggttattgctaaggagacagtgaaggagaatgggttgcaaaagaatggcg

SEQ ID NO: 193336 - DNA, 1152 bp, Arabidopsis thaliana landsberg
atggagtcagagccagaccaaagcttcaaagacctctcatggtttcttcaagcaatcaaagacccacaacaaacttttttcaatcttcaaaccctatctttctcctcttccggaaacaccacgcattgtcagctaataacagagagctccatgaacatcaacgtcactagagacaacctcacttcactttcccagatcttcatcgagctagcaacatccttagagacgcagacatctctcaggaacttggaattcgaaggaatcttttgggaaatcgagctgttgcagagcttgggtttgttgttagacaacacctcgaagataaagcagcttgctttcagaaagaacaggttcagtgaacaatgtctcaacgagctctcagagattctgaaaagaaacaggtttttgaaagaggttatgttcttagagtcgagtattggatacagaggagctacgcttctcgggtcggctctccaagttaacgattcgttagaggaattgcagatttgggaagattcgattgggtcaaaaggagctgaagagctttcgaggatgattgaaatgaactcaagtttgaaacttttctccattttcgactcgagccctttcactgctacgccattgatatctgctgttttgggtatgaacagagaaatggaggttcatatgtggagtggagatcacaaacgagacagaagcctaaagcttgttgagttcttgcctgagagcaaaactctgaggatttaccagattgacatttctggttcttgcagagtcgctgcagccttggggatgaatacaacagtcaggtctctagatatgacgggtgcgaagctaaactctcggtgggcgaaggagtttagatgggttttggaacagaacaagactctgagagaagtgaaactttcgaaaacaggtcttaaagacaaagctgttgtttatattgcagctggactattcaagaacaagagcttgcagagtttgtatgttgatggaaatcggtttgggagcgttggtgttgaggatttgctttgtccattgagtagattctctgctctgcaattacaagctaacatcacattgcggtcaattgtgtttggaggttccaatacaaagattggaagagatggacttacagcagttttaaagatg

SEQ ID NO: 193337 - DNA, 165 bp, Arabidopsis thaliana landsberg
aaaattagattccgagaagaaatagaaaccttaaagagcccatttcagttaaccgaagcgaaccgaaccgaaattatgccgaaggaactgaaatcgaacatcggtttattttggttattaaaacttgttggacggctccgcgagcttattcatcggcatctgtag

SEQ ID NO: 193338 - DNA, 566 bp, Arabidopsis thaliana landsberg
ttctggtcgagcagatccgccgcacctcgcaggaacgaaccgcggaaaaaactcgggcaggtgagaaacgcaggtacctttctcttgaaagagacagggaaacccagaaaggcgcgccgctgccgatgatagcaactggtgccctttctcctgccatcccatgcctttgtcgcgtgattgaagcagatttgcgccagggacggatctttcccgaaagcgtcgatgatgccgggcgaaacggggcgctgaagcagccagtcgtcttcgagatgcagcaccgtttccgccgttgtcgagcgccagttccttttgacggcggcggtgaagccaggggcgtcgggacagtggatgattgcgtctgcccgataggcgcgaatgagatcgatacaggcttcttcgtcattcaccgttccgaaagccggatcgatattgacgatgaatcggccgatttcaaaatgcgaaagcagattcttgtcgaaggactcaagcgtcgtggccagcaggtcgggtcttctggcggcggtgacgcaaacgtcgatcatatccggtgtccggaaaacggaacc

SEQ ID NO: 193339 - DNA, 112 bp, Arabidopsis thaliana landsberg
atatcgtaatgaattaatggaaatggataaagatgaatatcgagatatactagaagatttcaaaaaaacaaaaactagaagatttcaagaagaaatccaaatggatgaaaag

SEQ ID NO: 193340 - DNA, 39 bp, Arabidopsis thaliana landsberg
atgaattcgatatcgggtttagaggctttctctgacacg

SEQ ID NO: 193341 - DNA, 1621 bp, Arabidopsis thaliana landsberg
atggacgaagttactctttgtcttgcgcttaaagcatgtcgtggagacttgaaacgcggctgccaaatccacgggttttccacaacttctgggttcacttcctttgtttgtgtttcaaacgcagtaatgggtatgtaccgtaaagccggtcgctttgacaatgctttgtgcatatttgagaatctggttgatcctgatgttgtttcttggaacactatactctctgggtttgatgacaatcaaattgctctgaattttgttgttaggatgaaatctgctggagtagtttttgacgcattcacttattccactgctcttagcttctgtgtgggctctgaaggatttcttttaggattgcagttgcagtcaactgtggtgaaaaccggactggagtctgatcttgtcgttggaaactcgtttattacaatgtattcgcggtctggaagtttcagaggagctcggagagtttttgatgaaatgtcgtttaaggatatgatttcatggaactctttattgtcaggactttctcaagaaggcactttcgggtttgaagcagtggttatctttagggacatgatgcgagaaggtgtggagcttgatcacgtgtcttttactagcgtgattactacctgttgtcacgaaactgacttgaagctggccaggcaaattcatggtttgtgcataaaaagaggttatgaatcacttttagaagttggtaatattttgatgtcaaggtactccaagtgtggggttttggaagctgtgaaatcagtgtttcaccaaatgagtgagcggaatgttgtctcttggacaacaatgatttcctcgaataaagacgatgctgtgtccatcttccttaatatgcggtttgatggagtttaccctaacgaggtcacttttgttggattaatcaatgccgtgaagtgcaatgagcaaatcaaagaagggcttaaaattcatgggctatgcatcaagacaggctttgtttcagaaccatctgtaggcaacagtttcatcacattgtatgccaagtttgaggctctggaagatgccaagaaggcttttgaggatataactttccgggagattatatcctggaatgctatgatatctggatttgcacaaaatggattctctcatgaagctctcaagatgttcttatccgcagcagcagaaacaatgccgaatgaatacactttcggaagtgtcttgaatgcaatagcttttgcagaggatatatctgtaaagcaaggtcagcgttgccatgctcatttactgaaattgggtttgaatagttgtcctgttgtttcaagcgcgcttcttgatatgtacgccaagcgtgggaacattgatgaatctgagaaagtctttaacgagatgtctcaaaagaaccaatttgtttggacatcgataatatcagcctattcaagccacggtgattttgaaaccgtgatgaacttgttccacaagatgattaaagaaaacgtagcaccagacctagtcacttttctctctgtgttaacagcttgtaatagaaaaggaatggtagacaagggctatgagattttcaacatgatgatcgaagtctacaatcttgccccgtctcatgagcattactcat

SEQ ID NO: 193342 - DNA, 216 bp, Arabidopsis thaliana landsberg
cacgtaaacgccggccaggtagcctgccagacctgccacggcgagatccagaaaatggatgaagtaaaacagttcgccgacctcagcatgggctggtgtatcaactgccaccgcgaaaccaaagtgcagttcaaagacaacggattttacagcatttacgagaaataccacgaagaccttaaaaacggcaagattgacagcaccaaaggcatcacc

SEQ ID NO: 193343 - DNA, 209 bp, Arabidopsis thaliana landsberg
gagctcttcttagtgaattctcactcaaatgtggagtttcagctatcttggaaaatcacgtggaaaatgagcagactttgaaacaacaattggaagagatttatcaagaaaatcttaaaatcaaagagaggctcaccaagcttgaagggttggagaaaatgctcgagctaatgttccctcatctatcctctaatggtgtcaacaactaa

SEQ ID NO: 193344 - DNA, 112 bp, Arabidopsis thaliana landsberg
atggtgggggcttatgtcatgctttcagacatctatgcagcagaagggaagtgggtcgatttctcgagagtgaggaagatgattagcatgatgggatccaacaaaaaacccg

SEQ ID NO: 193345 - DNA, 515 bp, Arabidopsis thaliana landsberg
tcttaaaagatatggagttgtttttaatcttgcaagtcttccagatattcaacgagttcaacgcaagaaaacctgatgaaatgaatgtattccggggagtaaataagaaccctctcttcgtagcaattgttggagtcacttttatacttcaggtaagacaataacacaaagccactttaacctttttcctctttcttgagactatgatagtaaaatgcttctggttgaaaaatgcagatcatcatcgttactttcctcggaaagtttgctcacaccgttagactgggatggcagttatggcttgcttctataatcattggattggtcaggttggtccagtttctccaaacttagttctcagtgcttatgacacatgtatgaatgaacaatttgtttacttgctctgcagctggccactagcaattgttgggaaactgatccctgtacccaagacaccgatgagcgtctacttcaagaaaccgttccgtaaatacaaagcttcaagaaatgcataa

SEQ ID NO: 193346 - DNA, 329 bp, Arabidopsis thaliana landsberg
atgatttaagattacgttttggacgaaggcgtcggctaacagagagagtcacaaagatccgcccacagggagagaagaagaaacgatcaaaaaccggaaaccataaaaccagaaaccagccaatagttttggacatagttgaaagcagtattgttaaaacagattcttttccagaaaaccaggagctaagtgtgggccccagttcttccaaatgctcctcaaatgactcaaatcccatctggatgacttacgtggcgattcgaccaaatttcttactcgcgagcgtggaggccacgtgttcttgtcacagtctctctaaacacatttaa

SEQ ID NO: 193347 - DNA, 85 bp, Arabidopsis thaliana landsberg
agggtcaatgccaccgaccggaaaacaaccccccgtaatttgcattggcagtactacattggcagtactacggctgccaggttcg

SEQ ID NO: 193348 - DNA, 292 bp, Arabidopsis thaliana landsberg
atgaggtttgggaaagagtttgtgtctcagatgatcccagaatggcaagaagcttatatagattacgcttacctcaaaaccattcttcaagacatccaagcttcccggaataggtcagattccaataaccagagcagtactccttccttcgcacgtaacctaaccagacggtacaaccgcgacgccttggtctctgagaatcacgacattgtggtcaacactgtgacacggctcgaagaagggctcgagacggcggcttacgagactacgtttttaaaggccggagaagcag

SEQ ID NO: 193349 - DNA, 406 bp, Arabidopsis thaliana landsberg
atgtactcaaagtgtgggagtttagaagatgggaacctcgtctttagaagaactcccaataaagatgttgtgtcttggaacgctatgatctcaggcttgtcccataatggacaaggagatgaggctttggaactgtttgaggagatgttagcagaaggaatggaaccagatgatgtcactttcgtgaacattatatcagcgtgtagccacaaaggttttgtagagagaggctggttttatttcaatatgatgtcagatcagatcgggcttgatccaaaagttgaccactatgcttgtatggttgatctgctgagccgtgcaggacagctcaaagaggcaaaagagttcatcgaatcagctaatattgatcacggtttatgcctttggcggatactattaagcgcat

SEQ ID NO: 193350 - DNA, 272 bp, Arabidopsis thaliana landsberg
atgatcaccgcgcttttgctgatggtcctgccggggaccctcgtcgccgccggcgcacggctgacctggccgctggcgctgacggtcggaccggtgctgacgtacggggtggtcggcctggccatcgtcccgttcggtgcactcggaatcccttggaacgcaggcacggccctggccgcgctggtggtgcccggcgcgctggtcggtggcctggccaaggggaaaagaaagttgctggaccaccgccccggcattcacgtggcggccccggg

SEQ ID NO: 193351 - DNA, 844 bp, Arabidopsis thaliana landsberg
atggcagagcggataacgagaaaaatcctagagatagaacctggggatgaaggaactctcattctaatgtcaaatctctacgcatccactgggaaatggaacagggtgattgagatgaagagcaaaatgaaggatatgaaactaaagaagaatccagcaatgagttgggttgaaatcaataaagagacgcatacattcatggctggagatttgttttcgcatcccaactctgagcagattcttgaaaatctcgaagagctgattaagaagtctaaagatttgggatatgtagaagacaaaagctgtgtgtttcaagacatggaggagactgcaaaagagagatctctgcatcaacatagcgaaaaactcgccatagctttcgcagtgtggagaaatgttggtggaagtataaggattctaaagaaccttagagtttgtgttgattgtcacagttggatcaagatcgtgtcaagagttatgaagagagaaattatatgtagagattcaaaaaggtttcatcatttcagagatgggtcttgttcgtgtggggattattggtaaagtatgggacttgtcttgtcttgtcatttcagccattctcagtacacagtgttcgtcctcaaccttcagtccttttcttagcacaaactcgtcgatatttctcgtgaaaagctcgaggagcatcgctccaaagctgtaaagatcccatttgggactcggtttcaggattccgagtctctgaaactggctcaggcttggtgtaggcagaagactcgtgaggaagtttgtgtaatgcttactactgaaaatccgagaagatcaccagctggaaagaggacatggc

SEQ ID NO: 193352 - DNA, 594 bp, Arabidopsis thaliana landsberg
aaagctttagtacaagccaacagagatatcaattcaaccgcccttcctcgacccttagtcacagcagaagcccctcctttacatcaatcaagctgcaaggctcctcagccaaaaccaatatctcagcaaccagcagtacaatccaagacggatatcatcaattcaaccgcccttcctcgaccctcagtcacaacagaagcccgtcctttacatcaaccacgcagcaaaacgcctcagccaaaaccagtatctcaaccaccagcaaaacaatcaaacacagaaatcaattcaactccccatcctcgaccctcagtcacatcaaaagctatatctctgcaatcaccgccctgcaacacacctcagccaagaccaccgcctttaatctccaaccatactccaacttcttatcaaccagcttctgctccaccagtgcatggtatagcgcgaaggaccatggcacctcatttaagatcatctcgagctcccaactctgctgctgcaccatcaacatatccaaggttggctcaagaacaacaaaagcaacaacaaaagaagtcaaacagtagcttggtctatctctcagatgacgactag

SEQ ID NO: 193353 - DNA, 123 bp, Arabidopsis thaliana landsberg
atgcacaccagcatcatgaggccggccgtttgtccgaaagtgatccgcgtaccgtggaaaatttcatggatcaaccagttccacagcgactgggttgcccacaaatacaagctgatcataatg

SEQ ID NO: 193354 - DNA, 316 bp, Arabidopsis thaliana landsberg
atagatgaggcggaagaagcgggctgtgcggtcgaagagccagaagatgccaatagcggtgatccagggcatttgagggagattgtcgaggtcaatgtggaagtagacgccgaggaaggcgagcaaggctgcaagctggtggaggtgaaggaatgtctcataaaaggcatgtctgattggcgagggagagtgcaggaggagaacggtcatggcgactgtgcctaccaagccccaggcgaagaaaggcgtgttgcagaggcggtctatcatgtccgagacgtctgtctcgtccacggcgttgacggtccaggcgacg

SEQ ID NO: 193355 - DNA, 269 bp, Arabidopsis thaliana landsberg
atgggggtgaaccgttattacgctcttctgctcttgcatgattgtgataatgatcacagttgtgtgatgtttgctgtttcttgggataaaaaccaacaactttacggtggaagaaacgtggttaaagaaggttattctttatgtttttctaaaaatgctcggattactgttatggttcatccatatgctctatcataatttttattcatatgctctatcaagcggatgaagcggttctagcggaacaagagcggatcaagcggttctag

SEQ ID NO: 193356 - DNA, 404 bp, Arabidopsis thaliana landsberg
atgaagaataagcatgagatcgatttagtgattttggatttccatatgcccgatgtgaatgggggggacgctctcaatatcattggtaaacagatggatttacccgtagtaagtaagtatatatcccttattaattataccaatattttttattgtattcttctcgatatatataacgtaacgtagtaagacattctctaatctttgatatgatccaatgtgaaattattcatgtcaagtcatgtctcatgaatacaagaaggaaacggtgatggaatcgattaagtacggtgcgtgtgactttcttgtgaagccggtgagcaaagaggtcattgcagttctatggcgacatgtttatcgaaaaaggatgtcaaaatctggtttacataaaccgggtgaatcaa

SEQ ID NO: 193357 - DNA, 146 bp, Arabidopsis thaliana landsberg
atgaacctaaaacccccaaaaaaatttgaagttgtgaaaatgaaaaacagaatctgtcgtgtagggacaataaataagttgatttgtaagcaaaacgacagtgtgggctttggacttttgttgcctgctgcagctcccgtgagttg

SEQ ID NO: 193358 - DNA, 28 bp, Arabidopsis thaliana landsberg
attagctgctgcccgagttaccacataa

SEQ ID NO: 193359 - DNA, 197 bp, Arabidopsis thaliana landsberg
accagcggccccctggccgaagctgatagcgtcgattgcgcgctgttcctgctggtcatccacgactggattgccaagggcatcgccgaaaaggctttagcggatgccttgctcgctatgcgcccaggcggtattttgggggtcgagcagcatcgtgccgatatcggcaatgtgcaggatcctggcgccacaacggg

SEQ ID NO: 193360 - DNA, 1037 bp, Arabidopsis thaliana landsberg
atgagtgaatttgaaggtaagattcgaaattcgtttccctaaaagttagggtttattatatatactctctcccgatcaattccaatgatatgtctcaggctggattaagtggctcgaaccagggtatttgctgtggaaacctgaggatcctggctacgagagacctgcgtacagggattggaccgaggaggaagatgagcctaagtactcaccggagcaagaacttgctttactcgacaaacaaatccttgccagcgatgtatgacattttttttctccatgatttttatttttggtttaataatggagctctataaataaatttgtggttttgattgttatgtgaaacaacaggggtttgatatcgacttcacacacttccgttgtgtattcaattaccatcttgcttatctcgattcacatgaattcgttgatgagccagaaaccactagagatttactcgagaggctttctaggaaggcccttgatgactacaatcaagaatcagtgagaactaacctttatatgtgccttgtgctttcatcacatttacacccattgattcttttcttctctctttgtaaaaaaagcagagaacacaatttgagtttgtcaaggttgtgaaagcaaactttcacttttgttgtgcgattatgtttctcataacattcgaagttgttgacccttatgataacttgatcaaactcttccaaacaagggttcgccacgctgaagatatcgtgactgagtacgtcttttgcaggccgaaacccaatcaaggaggtatctctaatcttgttttgttttccatctctagttacgttgttgttgttttttatgaattcgttgtggaatatatatttgcctctttcacccaccatggaagatggattaagctttcgtgcttccttctttatatattttcgtgactatttctttagtagatttatagtatttggatttgtttgatagtggaatgcattggtgtgaagaacaatgatgggaaagatgtccaaacaaatgtcaaggaacaagag

SEQ ID NO: 193361 - DNA, 42 bp, Arabidopsis thaliana landsberg
agccacacatctcggggcatcaccggtgaagaagttggacga

SEQ ID NO: 193362 - DNA, 699 bp, Arabidopsis thaliana landsberg
atgaacaatacccccgtactgctcacgctgacttgtcttcgctcgtgcgtcacgtttgtacctttgccttctgtcaagccgaaggtacaaatgtaactcaatgttgttcttattcattcatgattatataataaaagatatattaacggtgtcatatgattattcatgttatttctcatgttccatatgcttcgtctttcattaatatatgttgtgatgatgaaggcatgcctttcatgaccttcgtccgaggatcattatatcctaagggagataatgcttcgaaggacggaggtccttaatctttaacattctctatgttgccttgttcttgattcacatcatttgagaacaagtccccaacattggcgcccacctccagtgaactcacttccacgattgcaacaatggcttcgcaagacaatcaagctctggcaccttcgactacgaagctggtgctcccaatcacaggcggctcaagttctgaaccagccaataagaagcagaagaaggaagcatagagaagggtacaacatgttggagtgcgaggacccttcatcaagtccaagtggtctcatgtaccaatcaccttctcccaggaagatcttcggctcaaggattatcctcacaatgatgcaatggttatatcttgtgtcatcaagggcttcctagtccacaatgtcctagtagacacaggca

SEQ ID NO: 193363 - DNA, 490 bp, Arabidopsis thaliana landsberg
tagttttacctctgtctgatagttggtaagctacgtttgggagattttaaagccttgttactgatcctaaaaatcaccacataatttttccatgttttatcctcagttacatggttacaacaatcactttctggaaggtcaccaattttgagatttttcagcttaagcacacttaattatgaagttatcccaaaaagtttcaccgaaaagataaatgcacgttggtgatatagatagtcaaatcaattctattaaacgttttcgcatgcaccaccatattcctaaaatcggggtgttacaattcatccccacaaacagaacgtaacgttctcgtggcacaccaagatcgtaaccccggatggagcgagctttcttgatttcacactcatgtgaattcggatctgatactacttatgacgttctgactgtccctactagtgggctccacgtcttctttcgggcatgtgggttcacctctgtcccacggtcg

SEQ ID NO: 193364 - DNA, 85 bp, Arabidopsis thaliana landsberg
gttaatgctcacatttacagaggcaagcaggataaaagcaaactattgttagtcgacaaatgccattatgagcttgatgttgaag

SEQ ID NO: 193365 - DNA, 144 bp, Arabidopsis thaliana landsberg
gctcatctatcccgcatgccgtctccatccatggccgatgtgtgcctcaccagccacctcactggtcgtgtgcgcgagctcctctgcagctgctcgacgcccctgctacctccagtccccgacgctgtcgtgggctcgccccag

SEQ ID NO: 193366 - DNA, 507 bp, Arabidopsis thaliana landsberg
atctttgccgccaaagcagatattggtgacaaccacatcatcaatcggcacatgcttgttcttgccatccggcgcgaaaatcgtgatgccgccattcagaatggtcgcaacacagatattgcccttggcatcgaccgccagactgtcgaaataggtatgccccggtgccgagccgacatagcgccctgcaccgcccagacccgcatccggcccaagctcacccggcccgacaatgtcgaaagccaaaagccgcgccgaaaaagtatcggccacatagactgtcttttcgtccggcgacaagccaacgccattggcgctcaaaaccggaaaagccacttccttgatcgaggacccatcaatcttcgcatagtaaagaccgccgcgatattggatgcgtccgtccgtcttgccatgatcggtgaaccagaacccgccttccttgtcgaaaacaatatcgttcggcccgatcagcggattgccattgcattccgtatagagaatttttga

SEQ ID NO: 193367 - DNA, 399 bp, Arabidopsis thaliana landsberg
accccttctcggaaaattctcccgctgatcatcttttcctcaacggccgtctattaccacactcttttccaacgagcacgataacgacacgttcagtgtcacgtactaccagcgaaaacactttccggagcgatagttggagcagccgaagcagttatagtagcagcccgacatcttacactccaagaacaagcacttgtaatatcttcaagatcacaagttctagtaccggtcatgggaaagagactaatataacatgttttggtactcggtccgaagagattatgtgcctaaggcccgcaacttcttcaaagaaaacaaacacttgcatcagcaaagaatactatcaccaaccatcgttaatattggatctaaagaagagaccaccggtggaaaatg

SEQ ID NO: 193368 - DNA, 281 bp, Arabidopsis thaliana landsberg
aaatcgcagagcaaccatcctttcccgttacaatcctcacacaaaatcacagcattgtcgtctcccttcacgaaaaatcctcaatcaattgtcagatccgatttcaacttcatcgatttttaatgtccaaatttttgtttggtacctgctgcgactgatcgagctgaggctcttgttgttgaagtggaacgcatcgaaatggcttaaagagacgacgttgttttcgacgcgacgtggatgaagccggcgacggcgctgatgatggcatcagccttaaataa

SEQ ID NO: 193369 - DNA, 221 bp, Arabidopsis thaliana landsberg
atgcctttgggaacaattgtgagattgcttgagcatcacggaagattaaaagaaaaagtcagcataggttgtttcaacaacctttataaaagtcttgtagacatgagcatcgataatttcaggaacgaagcttgtaagcagatgctggtttacccgaagagcgtgaaggaacgtcaatgcagaatgctgaagattaacatagacgacacagaagaaaccaa

SEQ ID NO: 193370 - DNA, 381 bp, Arabidopsis thaliana landsberg
atgacagttctaaacaaacatggaagcagtagttcagtgattgctgctgccacaagtgctgcgttggctgcctctacttctataaggcagcagatgaatcaaccagttaagcttgatgaatttggcagagacgaaaatctgcagaagcgcagggaagtggaacagagggctgcagcccggcagaaaaggcgagctcgatttgaaaataagcgtgcatcagctatggaggttgatggaccttctctgaaaatagaaggagaatcaagcactgatgagagtgacactgagacttcagcttataaggagacaagagatagcttacttcagtgtgctgataaggtctttagtgatgcatatgaggagtactcccagctttcaaag

SEQ ID NO: 193371 - DNA, 198 bp, Arabidopsis thaliana landsberg
gatagccgctcgcgatactttattacgggcagctcgtcagcctgcgcacgcgaggctacaggggaaggggtcaacgccgtctggtgcgcccgaacttctggcaccaacccggatgacggcatgtcaggcacaccccccgaagtctctgatcttgggggcaagcgctgcggtgctacaggccgccgcagagacaattga

SEQ ID NO: 193372 - DNA, 2108 bp, Arabidopsis thaliana landsberg
atggcggattttctcgccaggtatgaattggaatggcgtttggaacgaggagcttctgctacgttcgccggtaattcaataacagcggaagatgtcgttgccgccgtcggcgtgaggattcgtaaggataaggcgggaatggagagagatgaagagggacgagagtgagtgttgaagagatgaggaggacaacgtagttcgagtcccacaagaagtggcgtctccattgttttttcgagctaaccgagccagagcctacgaaagtatccatccatctttgaacatgttcctgtttcttttaccaaagtatccccgcgtttttaattgtaatctagtgctagtttgagaagtgaagggtagtatagtaaattagaaaaaagttctaatcccaaatggccaaatctcatcctcaacaacgcaaggacaaacgccgttttatgatgggcttttcgggagagacaaatgggcttttaggcaaaccattaatttgaaaggattatctaacgggccatattgtttaaaaaagcgcaacaccaaagtttgtaatgttgtccatatccaaattggtgacgaaaattctgagaggaacagtaacaaaatctttgacaaacaaaaaaagaggtacagtaacaaaatagtttttctggacaaatattcccatgcgcacgcacttgtcacatcatgcactgttctttgtgcgtcctatgtattgctccatgcactttcatacaagaaaaataataacttgtcatcactgacatgtttttcaacaaaatggcgtttctattgaacctagtttctctaaattacatatgtattgtagaagaaagaattcaaaaacagaaaacagattctttgcatcggcttgtacggcaggagaccgacaaggaacaagcacagacccactccccttgtgttcatacgtttcgtgacacccacttcaccattttttttttgtttttttttgaattttataacacacttcaccatttcttctagcttaggtcaattttctttatggaattcttaacctacaaagttggtatttaaaaaaaaaagaagctattaactcatatattacgttttgatgtacccctattaactcatatatgtaacatgtaaaagaatactatttcatgctacgctaggactatctagaccagatttttgctaatcacacattcaaattatatgcgagtaacttattcttcttcttttttggtaacatatgcgagtagcttaccactatcacaatacttaacttacaccatcattggaatcgaatctcgtagtataatattagtcattggattatagaatacacatacaagcacaaggaaattcgatagtttccaatcgttaaattattttcatacggatttaaacacatattagttgaacagaagaaaagacaaagatttgaactccataataataataaccaataagcattgaagcagaagcaacaaaaataactagcaatatagtaagggtcctatcaatatcatttgtcttgttttgttgtgttgtcacgattcaccaagtccctatcacttggaatcgcgattaacaacatcgtccatatctcttttatatatatcttccgacgtcaacatcgttaatcgcatctaaatttagttagttaaaaaatcatcagcagaacaatattttagtggtcgggcttttttatttattcagcgatatctgaatctgatcctggacggtgtgcaacgtctttttccgatttaaaatcatttttttgcattagtgcgatttaattgtgtttctaaaacctatcacacaaaaatgcatacgttttactatttcatcaaaccaacaaaaaagtttgagaggagctcctcgaggttggtccgattcggatatataaacagaaggtgggtttccctcaagatttcgagaagttatcgttattgttcacatctttgtggagttaggattagtcaacgtcaataaatactttggtttatttgatagtatataggtgcgatgtaatagtcaacgtaagaattcgaagatgtaaatatgatcgatattggttgacctactttatcgaggaatacaatttctgcaatttttctgacatttga

SEQ ID NO: 193373 - DNA, 323 bp, Arabidopsis thaliana landsberg
gatgctcttaatagcacagaaacacatggccagcaactccattatggatatgaagggtttgatccaagcataaactccgctcctgatttccatgaccaaaaactcagcagcaacttggatataacttctcagtatgattatattttctccgaagtgcgtcaggaactagataacagcccttccactaagcttgattcttctgaagagattgacaactttgctgaattttctactccatcaagtgtccgtgtgcctccatctgcttttctgggacctaagtgtgcactatgggattgcacaaggcctgctcagggctccgagtg

SEQ ID NO: 193374 - DNA, 111 bp, Arabidopsis thaliana landsberg
caaaaccatttgcaggaagacaacccaaacaaggaaaacggtgcagaagacaatgacgctatgcgaaaaattaaaatgtacccgataattttgagcgaaacatttttttga

SEQ ID NO: 193375 - DNA, 3101 bp, Arabidopsis thaliana landsberg
atgatgattcaaaggcgagaaaacaaaagaccaccaccaagggtttatatgggaaactcagtaagtaaaaatggaccaataggagtgtttgacgaggattgtactttaatgttcgttcaaagctcttttaactttccccatcatctctttctcacctcctctctctttctctctctttctctctctgaacccagaagaaacctcaaaaaaaaaaggtttctcaaaacaacaatggtgagttccacagacacaatctctgcttcatttgtatcaaagaagtctcgatctcctgaaacatcaccccatatgaaagtcactctcaaggtcaagaaccaacagggagcagaggatttgtataaaattggaactcatgcacatctaaagaaactaatgagtgcttactgtacgaagagaaacttagattacagttctgtccgattcgtctacaatggtagagaaatcaaagctcgacagactcctgctcaggtctctctcatctttagtttcttctgatttttgtttatattattatgtatctacaacaacactgttggtcactgttaactttcatttacttttttgttccaacagctgcacatggaagaagaagatgagatctgtatggtcatggaacttggcggtggcggtccttacactccttgagatctcgccggagtttcttcaaaattttcccgatttgttcgcgggataaacagattaggctttctaaagaactttagttatttttcttaattactcttttagtttcaatgttgcatcttaagtctctcttaacgttgttgttaattcgtactaatattttccaaggaaattagttaatgtttttctctcggtaattggtaaataatctgagaaccggaatatcgagaaagcgtccaccggttcacagagttaaccgggaaataatcggaattgatattaccttcctgtaaataaccaattttctgtggtaaagagtttactatcttaagatttcatgttaagatttcattccaaacagagtttattatcttcttgtttttttttttggtctaatagagtttattatcttcttcgctgcaacaaaacatttatgtgaaaatggtggtaaaatatacaatgtcgatgtcctttttcgtcattttcgcttctactgttactatcatcgttcatggtttcccatcgacactcgacggtccgcttaaccccgttactgctccactcgacccgaatcttaacccgattgcattcgacttaccagaatccgacccgagtttcgtaaaacccatttcggagtttcttcttcccgaacagatctctgtctctctctcttacagctttgactccgtctggatttcttgggtcacaggtctctatttgtctcttcaactttctttacctttcggaaaaaacaattttttttactacaaaagtcttgaaatattattaaattctcaaaattggacttatttatgtttacaaaaatgtggaatgtgtgattagtttatcttgaaagtacataaagggttaatctttttgagccaagagctggatctacttaagaagcttcatcaagatttttgcttaaatattcatcctttaagttaactatttgcatttgcatttgtctgaactctgaagcatggttgttgtattatatactacaggggaataccaaattggtgaaaaagattctgcacctctggatcctaattgtgtgcaaagcatagttcaataccgtgaattcgatgttcgtcgtactaggaagcaaaatgcaacaggccattctattgtttataaccaacagtattcttctgagaatggtttcatgaactatacttcaggcatcattcaccatgttcaactcacaggtcttaaaccaaacacattgtaccgataccaatgcggagactcttctttttcagcaatgagcaaagagtattagttcagggcaatgcctaagtctacatcagagaattatccacacagaatcgttgtggctggagatttgggtcttacttacaacacatcaactgttttggggcatattctgtctaaccatccagatcttgtggttttacttggaggattcagctacgctgatacttatcttgcgaataagactaaactagattgtagttcttgtcattgtgaccaaaatggaactagttctgattgtggttcttgttattctagtggagaaacttatcagcctcgctgggattattggggaaggtaaaagaagattcttctctagtgattgtgaatcctttgatggttttaaacactaaattattgggggctttgtctttgatgacaggttcatggagccactcacggctaatgttccaaccatgatggtagcaggggagcacgagagtgagccgcagaccgagaataatctgacattcgctgcatacagttcaagattcgcattcccttctaacaaaagcggttctttctcaccattatactattctttcgacgcgggaggagctcatttcatagtgctcaattcatacacaccttatgataactcatgtatagtttctccaggttttgattttctctctttaggtttaaatttcattgaaatgtgtttctaattttcttaattccctgtttcttcaacagctgatcagtatatttggcttgaaagtgacctgatcaaaataaacagatcagaaactccatgggtggttgcaacttggagtcttccttggtacagcacattcaaagggcattacagagaagctgaatcaatgaggattcaccttgaagacttgctctataactaccgagtcgatatcgtcttcaatagtcatgtatgtgtgttgttctgttaaagtattcctttgcttttgggaaatatcttcttttacgctaatttcccacaaaacctgaactaggttgatgcatatgagagatcaaacagagtctacaactacacgttagaccaatgtggcccggtttatataacaaccggtgcaggaggagctgggaagctggagactcagcatgtagacgacccaggaaatattccagatccttctcagaactactcgtgcagatccagcggcttgaacttcacgttggagcct

SEQ ID NO: 193376 - DNA, 47 bp, Arabidopsis thaliana landsberg
atacagtatggtagacactgacgtcgacttagacattgcgttcacaa

SEQ ID NO: 193377 - DNA, 456 bp, Arabidopsis thaliana landsberg
atggtttctacacgagccgccgtgaatttccttcatgatcttgcaagtcgcttctccttccacgcaggtcatcaagggtccggataatcgccacttgtaaagtttttcatctactaagacgaaacgcgcagcctgagctttgagtttacgagccttccatttgtccgagggcaacttcccttcggatatatagcttatgatcggttccatccattctgagctgcattcgtctgagtcatcttgatccgcgctgatttgtatcgggaggacgtgctcttcttcgccgagctcaatacttggcttttcaatgaattccactgggatgactcttctcaggctcgggtcggaggttgaggctagagcagctagggcatcggcagatgtattttctcctcatggaatccttgttaactcgaattcgtcaaaattcttttctagcttttgaacatgaaccag

SEQ ID NO: 193378 - DNA, 49 bp, Arabidopsis thaliana landsberg
atgtctctctcctccatccaaacccttcctccaagtgaccggagcgaag

SEQ ID NO: 193379 - DNA, 156 bp, Arabidopsis thaliana landsberg
atgtttcttatgatgacacaagaaccattatccctgaagagaaagaatcactatctctatttcgacaaaccatcaaagattctattgacatgatatctacaacatctatagttcggtgcacactggacttgcttcacttgtttcaagaggcacaag

SEQ ID NO: 193380 - DNA, 773 bp, Arabidopsis thaliana landsberg
tttatgctttacgctaatgttatggacaatcttggagaggcaaggtttctcttatttgattcagtttgctctgaactcattggcgagtcagtcgcatctattctcaatggatcactcgatgaggtaggttctctatgtttattaacacaaacagaagcggtgtaaactgaatagatcctacactgattgtaatatacatttttccttcttaggttgtggaccctgagaatttgctacggccagttaaaaacttaattggaacgacctttctcttcttggtgaaggttgaaacgaacatatatcagatggaaaggaagactacaaagtttggaaagttctttgcaaggttgaaaaagaacacataccatattttgctgatatggtgaataaagcctctattgtgtcagctgatcaggttagctaaatcaaacattatctaaaatttagttggccgtgtattgacaattggaaactgatatgcgaacgatttctttcccaaaggcacaactcatgttagagaatagccacgacacatcagactccggtactccttcttccatggtattgctgatgaatcctccacctctaagaagatatatgttgaacccattgacttggaaaagtcaaacctagaattcagactcacttctcaacacgcacaactaggagatcctagcggaaaggatagggatgagaaaggaaaaggcgtggagactggagtaccaagtttgaggagcagcgttcagtatgaaaagaaggacgtggctgtgaag

SEQ ID NO: 193381 - DNA, 11 bp, Arabidopsis thaliana landsberg
gtgagaaatga

SEQ ID NO: 193382 - DNA, 185 bp, Arabidopsis thaliana landsberg
ccgctatccagaatgccttggagaccgcgagcgacgccatcgccgaagcggtggccgagctgacgaaggccgtccaggacgcccctgtcgcgggggccgacgagaccggctggcgcgaccaatcggggttagcggccggcaaacggccctggttgtggggtggcgaccacgcccatcgggtcggt

SEQ ID NO: 193383 - DNA, 490 bp, Arabidopsis thaliana landsberg
ccgaggcgattcgcgccgtcgaactgggcgaaaccaacgcctggaagccggttttcgcccggctggccgaactgggcctgttcggagtggctgttgccgaggagtacggcggcaccggcgggcggctcgaagatctgtgcgcgatggttgacgaggccgccaaggcactggtgcccgggccggtggccagcaccgcgctggccaccctggtcgtcaccgatccgccactggccgaggccctggctggcggcgaacgggtggccggggtggccatcgatgccgacctggacttcgatgccgcggccggccaggtgtcgggcaccgccgaacgcgtgctgggcgccaccggcgacggactgctgctgctgccggccggtgagcagtggctgctggtggacgcccgttccgatggcgtgacggtcgagccgctggtcgccacccccttctcccggccgctggccaaggaaacgttaaagcggcgccggcggtg

SEQ ID NO: 193384 - DNA, 1500 bp, Arabidopsis thaliana landsberg
atggtgactctttgttacatacacagctatggattgatccatcagaagaatttttgcagtatactcacgcaggtgatccagttgacatcacattttccttgaaggaactaaaggtttaacattcctcctttggaagtctggtttgaatttcatccacctctgtttgtgtcaactaaatatcttcaataatttcaggcatttcttgcattctgcgagggctgtgaagccgatattcatctttttttcgaaaaagctggcgagtaagaatcctatgtttttcatgctttgaatttcgcttattaaaatgcatcttcttgtgtactcttgacatcttttaaattcgattgcaatttcattctggccaatacttctaaactatggttcttgtctataaaggtgcatgcttatcaaatttgctagctaaaccactcatttaaacaccaaattcttttttggccgggacaactagttttgtagtcactatcttatctgttactgaatgtcataatatgtacttcgttgctagaccaatactgatggctccaaaattcggtttgggtgatgggtcaagctccagttttgatgcaacactcgttcttgcgacaatgcttgtgtctcaacttcaggaagggattccggcagaacctcctgaagcagcaaactccacaggtggccatgctgccgagcaagtaggatcacggcctcaagaacggtctaggcaaaatgcctctgagcacccatctgatcacacacgagtatggtctgaactttcaggtagttactaatctaatggttatgatttgtattcacaatatttcctgttaactaacaccttaagaaatcaatgctcggtagcaggaactgccactaagagcgtgaacggtactgaggataggccacaggctcagggacaaccagacttggatatccatagaattaggaatatggaaatatcaaaaggcgggccagttggagatactgctcctgcagctcctcctaagtcgtatccttcactctcacaatcactatcactaaacacttcttggcatgtttagctgttcagcattaaatcatagtccataattgattagaaattcctgcttgtgtagttgcaatttgcttctaaaatgcatttcttagcctatttaacgactaaccatttcagcatgccccataacccgaaatcacatatctccagtgactgtacttctttctatatatgctttgttatctttgactctatttcagccaacgtcccacacagatagatcatgctgaaggatcccgaggtacctgcaaaatcatttctacagccttgtcttctcttgtctcgttacttatcctaaaaagtagtcatttctttgtcacttgtcctcagtacgggtacagaaccaaagtttctcccagcaccatcctagtaattgggtggatgcaaatgaggaagaagaagacgacgacgaaggtgtcgaggcgacaccacctcacaatgaagattattaa

SEQ ID NO: 193385 - DNA, 153 bp, Arabidopsis thaliana landsberg
aagggtaaattagtatttaacagaaactcttgggacccgaatgaattaaatgggttaacgcctttatgtaatgtcgccgtcaacttacaacagtttcttcacggcttgtgcaatgaaaacgtgccggaacttgtaacgaacattgtagtttga

SEQ ID NO: 193386 - DNA, 44 bp, Arabidopsis thaliana landsberg
atggatccctatactattacagaaacaccggtaataaatcagcg

SEQ ID NO: 193387 - DNA, 136 bp, Arabidopsis thaliana landsberg
atgaattctgcaggtaagcaatgacttgttcgttgttagtgaatagtgatgatcgacagcgtcaagagtccatccccatcgatgtattaattttgcgcaaaaatttgcagatgaatttgcagattgcaatgcctaa

SEQ ID NO: 193388 - DNA, 1660 bp, Arabidopsis thaliana landsberg
tacgcttcacaattgagaagagacactcttcactgttcatataacgtccccattgttgaattcgagagtgccaattttaaaccgagactgatgattgagaagaaactgtcgaagatgaagatgagaaccaaatcgattccggttaggtcttcgcgcaaatccctcgattcgcttctggtaaacctatttcttcccttcgtctctatttgcttctcggaacagtctcctttagaatcggaaaactagagcttgtaatttcctggtgcagctacatgactgattttggttttgattttgattcgtatgttataatcaaagcttgttttggattctgtgtgattgtggaggttgaattttaaatttggaactcgcgaaatagaaactgttacggttgatgtatttgtgaatgatttctggtcatttcctttcacaggatgacgaagctaatgaaaacacacaatgtgatgaaagagatgtgccacacaagaagcgtcgttgtcttgggactagtgagactactgatagaggaggatctgtagagtcgctgctggacttggatgcttgtattgtatgtgaagtttcagacgagcgggtatctcgttgttgcggggttgactgtcttctttcgtttcacggcgagtgtttgtatgctgatttgggtagtactagtagtagtagtagtagtagtgaggatgtttcgaatccattttgtccttattgctggctcaagattgttgcactgaaatccaaaacattgagagaaaagaccgttgaggcggaaaaggcggtctgcaagtatctagataaagagatgaaaagcagggatgaggatataaccttatctggtgatgaaattggaaaccaagagcagagtacagacattgtaagtgatcatgagttacaaggagagaaggatggctgttcatcaaaaccagatgcggatcaagggaaagtgggtactggtaaagtgattgacgaagttggagcatcagagaaggtagctacagaaaaatttcaagacgctgaagatgatgaaacagctaaagatcaaggtacaagaatcctgaatacaggtgcccggaaaaagagagaggtttcttcgtttttgtaaatgcaaaaatcgttttcagcaaaagaacaggaccaggtccagcagaatgagaagcgaagaaggagaggattgaaaattatcgatagtgacatctcatcaaagggatcaagtaacgaacgaaatggagaagatgtaactgagcaggtaacttcatcggttcaagtaacctccccgtcagggagaatgaggaaccagcaggcaacaaccaaagttgtggctaagtcaaagacagtgaggttgttcctttttcttcactcactggaacatcaagagttcatttccacattaaatttagaaagttacctcatggatttgcagggacatttctttctttaagatggatcaaagaaggaggctactttggacgtacgaagaagaagagatgctaaaggtatataccaaacctacactagctgtattttcatgaattgaataagaattgttgttgatatatgtgttggttggttggttcaggtgggagtggagaaatttgcagcagaagcaaacaagaacatgccatggaggaaaattctggaaatgggagagaag

SEQ ID NO: 193389 - DNA, 69 bp, Arabidopsis thaliana landsberg
atgcatgatgcagctcggaatctgggtgccagctcagtccggtgtgagcggtatctcaccggctattcg

SEQ ID NO: 193390 - DNA, 481 bp, Arabidopsis thaliana landsberg
atgctggaaccacgcaggctcgcggccaaagcagttgctggcagtatgtttttgttactggatgagccaacaggtactaccgttggttacagagttcgctttgacaataagatcagcaaaagcacccgcattgaagtacttaccgaaggtattctcacacgtatgctccaacaggacaattcacttgaaggtattggtttggtaatatttgacgagtttcacgaacgcagcctgcatgcagatctcgcactggcgctttgccgtgagatacagcaggtattacgagaagatttacgcatcctgattatgtccgctacgcttgatggagaaaaactatcttcattacttggaaatgcccctatactcaccagcgcaggcagacaatatccaatcacatttcattatatacctaccgataacgaaacatacatgcaccagcaaatggcaaaagccgtttgtaaagcaatcacttcacaaccgg

SEQ ID NO: 193391 - DNA, 136 bp, Arabidopsis thaliana landsberg
atgcattaagaacttctcgattttcacataatctaacgttacataatctcgattgtcttctctttggatcatatttcaaaatttacgtgggatttataatcgagagaatcattgttttccccgatattattacaac

SEQ ID NO: 193392 - DNA, 310 bp, Arabidopsis thaliana landsberg
gaaacagaggctgaagctaaaagcgatgttgaaggcctttcttcctggaacgcaggaggaggaaacattatcttctttgcagtctgggtaggcactttctatttatgaatagtatttcaacattatcctttctgttgtcctgagaaataacaatggaagtcgttgcctcaaatgtgcaggaaagtcgatgcaaaaatggaaatggacgacccagagaaggcaatggctacagttgctcagctcatagagcaacttcatgcgaaaacatcttcaccgcaagataaagaactcacaacagctcgtctactag

SEQ ID NO: 193393 - DNA, 190 bp, Arabidopsis thaliana landsberg
atgccagtctttacggacccgttatatcaggccgtctcaggtgtcccaaactcgcctaccatccaaccctctttctgcgacccaatggttttcggtcttatccctccgtatgccatgtcccaccagatgcacccacccgtcatagcaaacagctttagacagagacatcaaggcactgccccaggcaaag

SEQ ID NO: 193394 - DNA, 251 bp, Arabidopsis thaliana landsberg
atgtctgttcttgaggatgtgacgaccaacgtaaagaaaattcaagattccttgttggaagcaataatttcacgtaatgctcagaccaagtaccttagaggtttcctcaccggtcaatttgataagcagagcttcaagaagaacgtacccattgtgacctacgaagatattaagccccatatcgatcgtatcgctaatggagagccgtctgatctcatttgtgatcgacccatcagtcttctcttggccac

SEQ ID NO: 193395 - DNA, 106 bp, Arabidopsis thaliana landsberg
aaggcaaggcacaagtgggactaaagacgccagatttagggtcttgtctcgtgaaattaaagccagcgaaaaccggactcgttgtttccggtctgaaccgtattaa

SEQ ID NO: 193396 - DNA, 119 bp, Arabidopsis thaliana landsberg
agttagctgttttcggtttacatttcactgaaacggcaaacagttggatctttcagcaaataaacgacggggcgttttcggatcctcctcttcctgtgaagtctgcctgcaccagatag

SEQ ID NO: 193397 - DNA, 110 bp, Arabidopsis thaliana landsberg
atgagcaggcataaggtatgtgagcaggcatgccaggtgctgaacaatgcgattgatccctttatgaggctgccggaaaattttgcgaaaccggcacaattgttggaaag

SEQ ID NO: 193398 - DNA, 74 bp, Arabidopsis thaliana landsberg
atggagcatcgatgttggatggacaagcacatgggtgaagatagtgaacgagtggtttgccgcagcgatttacc

SEQ ID NO: 193399 - DNA, 277 bp, Arabidopsis thaliana landsberg
atgagcatagagcgaaaagatctgtcacaggaaagctcaacctggaaaaacgaagataattcagcttattttgaagccattccaccctctgtgtttcaagaacttcctattcgaggcggctttgaaaacggctgcgatattgagttgattatgccttttataaaagatacaaactcattaattgaagccggcgccggttatggtagagttatcgataatctgttaaaaagaaactacagaggcagaatatttgcccttaaaagaagtcaaaactttt

SEQ ID NO: 193400 - DNA, 219 bp, Arabidopsis thaliana landsberg
atgaacgctggttatggagggtgagacaatatttcactatatacttcacaaatgattcatttctctcttgttaaccatttgttcatatcttccttttcagatttgcggctgctcttataaacaaacctctgtgggtgatgaatgtgattcctgtggaaggtgaagacacgttatcgacgatttttgatagaggtttgatcgggatataccatgattggt

SEQ ID NO: 193401 - DNA, 123 bp, Arabidopsis thaliana landsberg
gaacaccgccgaaggggacgacgacatgggcgccaccgccgaagccgagcgatgacggcagcggggcgaacgagcgagagatgggaggcgacgacgacggtgctccgtgcccgggccctggcg

SEQ ID NO: 193402 - DNA, 72 bp, Arabidopsis thaliana landsberg
ttcaatccagagttcctcgtggaactaaacatgcgttggtccaagcttgagaagttatgggaagagattcaa

SEQ ID NO: 193403 - DNA, 641 bp, Arabidopsis thaliana landsberg
  unsure (1)..(641): unsure at all n locations
atganaacggatgatgacgcctttgttcgtgtagatgaagtgttactttctttatcaatgaccaacaacactcgcgggttaatatacggactgatcaattccgactctcaacctattcgaaaccctgatagcaaatggtacatcagttatgaggtacaacacaatctgacatagctatgtttgcaaatagactgatttctgattcatttaacgaagtttctactcaaaaaacaggaatggcctgaagagaaatatccaccatgggcgcatggtccaggctacattgtatctcgtgacatagcagaatcggttggtaagcttttcaaagaaggaaacctaaaggtattgtactactctatgctaactccattcaatcacatttccggattcacatagaaatggattgtgaaaatttttgaaatttgtgaatagatgtttaagctagaagatgtggcaatggggatatggatagctgagctgacaaaacatggactcgagcctcattacgaaaacgatggaaggatcattagtgatggatgcaaggatggttatgtggttgctcattaccaaagccctgccgaaatgacttgcctttggcgtaaataccaagaaaccaaacgctctctttgctgccgcgaatg

SEQ ID NO: 193404 - DNA, 96 bp, Arabidopsis thaliana landsberg
aggactattggtgtatatgagggtagcgtagactctgcgtaccttttgataaattattcgatgcggttctacgtcgattatagctatagaaaataa

SEQ ID NO: 193405 - DNA, 155 bp, Arabidopsis thaliana landsberg
ctccaactccagcgtccgctctagcttcggtgtaccgctccaactcccccgctgcagctccggccacaacgcaaggtacgcccatcggaaattgccgtgtcctgatcgtggatctaattgttttatcggaaatgattggaattcacatgagttaa

SEQ ID NO: 193406 - DNA, 86 bp, Arabidopsis thaliana landsberg
gtcatcgacgagcgcccttccaccagacagtagtgccaatgcgagcacatcttctggacgcacacattcttgacactgtccactga

SEQ ID NO: 193407 - DNA, 51 bp, Arabidopsis thaliana landsberg
atggagccaccttcatcgtctccgatagacactgctgctacaacagcctgc

SEQ ID NO: 193408 - DNA, 282 bp, Arabidopsis thaliana landsberg
tcatcttcgcccttctcatcatatgtttactcaaacgccgtaggtttgatgtatcaccggaaaccgagaacgagaaccaaggaagaagagagccacggtgccaagggcttagcgcttccgtgattgctgcctttcccaccttttcttacaaaccggataataatgatcctgagagcaacaatcaggagatcgagtgtccggtttgcttaggattaatccccaagaatgttgtaattaaggttttaccaaattgtatgcacatgtttgatgaggaatgtatcg

SEQ ID NO: 193409 - DNA, 126 bp, Arabidopsis thaliana landsberg
acgctatgcgactatataacgctggaaagccgaagcagcacaacactagaaccagcattatcaaacagatgtacatcacatttctgaatccgtctcttagctccggtttgtcttgtcccgtccaag

SEQ ID NO: 193410 - DNA, 55 bp, Arabidopsis thaliana landsberg
atgcaatatctatccggcatccagagcaaagcggaagctatcaagtcatcagagg

SEQ ID NO: 193411 - DNA, 12 bp, Arabidopsis thaliana landsberg
atgagctgcatg

SEQ ID NO: 193412 - DNA, 78 bp, Arabidopsis thaliana landsberg
atgaacatgtatcaggtttccgtcccgtataagctagcagcgttcaacggagagacgagtgccgcacgtgccacagta

SEQ ID NO: 193413 - DNA, 209 bp, Arabidopsis thaliana landsberg
atgcacaacatcgaccaaagctcaaatagattaatccacaaaataccaagtgaacaacctggacgaaacgagattagtcacatgggctgcccacaaggctcggcgtttcgtcgaacggacaaggcgcgaccggcagatcgacaggttgctgcgataacacaagagttcatgaatttggcatatcttcgaacaccacggacacaaaaaca

SEQ ID NO: 193414 - DNA, 397 bp, Arabidopsis thaliana landsberg
agaatatcgaccgaatcaactgccaatatgcattgatcatccggcgcctagcgtcgatctatcgcccatcttttgtggtgaaggatatgttatctctgataaaattcgccgactatggccaacccactggtgactgtaagaataacacgcttaaacgtggaaaccgcggcgcacccgctactttgaggctcgtcaaaaaggttagcagaattaactagcgttaatatgttatgttggttttattgtcaatgaatcttatcgtacgttggcattgtttatgcagaattgccttggaaaaccgaagtgtgtatttttagtgacggatgagatgtttggtccgagccattgcaagggacctcctacactcgcggttgacgccacttgtacaaaaacctag

SEQ ID NO: 193415 - DNA, 612 bp, Arabidopsis thaliana landsberg
aggaaaaagcttagtccaagatacgtggggccatacaaggtgctcgaacggattggggcagtggcctacaagctcgatctaccaccaaagttagaggcgtttcataaggtttttcacgtatcgcaacttaagaagtgcctaagcgaacgagatggccctgtggaagatgttcccgccgaattagaaggaaacttgacgatgaaagcaaaacctattcgacttgtggatagatttgagaaagggactcagaagttaatcatgaaaatggtaagggttgtgtggaattgcggagatagagaagaagatacttgggaaactgaaaacaagatgaaggcagattccccggagtggttcaaggagatgggtaaaaaggaacttgggtcggattcggggacgaatcccattcaaggggggagacttgtagcgtatgcgatcctcgataggatcgccggatgggacttggtccgagggaaaaggtggaacctcgggcaagtccagaattgggctgtactacagctcaatataagctcggccaactcgaggggaagctcggccagctcaaggttagctcggctagctcgaaggaaagctctgccagctcgaccaacctag

SEQ ID NO: 193416 - DNA, 1355 bp, Arabidopsis thaliana landsberg
atgacccgtgatgacaaattcccgatcgtatactctctgttattgatcgtcttgctcttcgtttctcctatctacggcgacggtgatgctgatgctctattgaagttcaagtcatctctcgtgaacgccagctcgctcggtggatgggactctggtgagcctccttgctccggtgataaaggaagtgactcgaaatggaaaggagtgatgtgttcaaacggctccgttttcgctctccgtctagagaacatgagcctctccggtgagcttgatgttcaagcgctcgggtccatccgcggtctcaagagtatcagctttatgcgtaaccattacgagggaaaaatccctcgtggaatcgacgggcttgtttcgttggcgcatcttttccttgcgcaaacccagtttaccggtgagatacacggtgttttgttcttccgggatgaaggctcttctgaaggttcatcttaaaggaacccggttttccggtgagattccggagtcgttagggaaattgccgaagctttgtgagctgaatcttgagaataatatgttcgccgggaaaataccggcgtttaaacagaagaatctcgtcaccgttaacgttgctaacaatcagttagagggtcaaattccgttaactctcggccttatgaacatcactttcttctcaggtatgaatcatcatcatcatcatcaaatctgtttatttttctttgattaattatcatctgaacatctttcatattataatctgatgtatatatatatatatatatatatatatatatatatatatatatattggcaacacacaacaattgtgaaaattttcctaaggactagactttatgtaattatcactattcatgggaaaatttgaacatattggtcttggagcctttggtgagtagtagtgagcacgttattaggcattaaattttgcatgtaataaaaaaaaatgtttgcatgtaaaagttacaatatgaaattttatttcttcttttgacaaaatatttgtggaaaatactctctttgaaatgattattagtgggcctattgataaatgggccatgtatgatgttaattaaataattcgtttgggccttaaaacaggtaacaaggggctgtgtggagcgccattgcttccgtgcagatacactcgtccgccgttcttcaccgtgtttctccttgccctcaccatcctcgccgtcgtagtgctcattaccgtctttctttccgtttgcattctcagccgccgtcaaggcataggacaagaccaaatccaaaaccacggcgtcggccattttcacggacaagtctacggacaacccgagcaacaacaacacagtgcttaa

SEQ ID NO: 193417 - DNA, 393 bp, Arabidopsis thaliana landsberg
gtcaatgacatgctctgggtggagcatttggaggtcatgcagcatacccgttcaagcgtgagcctccgggcctacggccagcaggatcctttgatcgaataccgaaaggagggaatccgactcttcaaggagatgcaggaggcattctatcgccgcgtcgcagaactcataccgaatatccggctcgaagcagtggaaaaagaggagacgaagataaagaaggtgcaagagcacctcacgctcgcgggaggttcagaggaggcacgaaccgccccgcgctccgcaccggtagagaagggggtacagatcggccgcaatgagatggtaacgatcacggacggtacaaagactgagaccatgaaatacaagaaagcagagcctttgatccagagg

SEQ ID NO: 193418 - DNA, 382 bp, Arabidopsis thaliana landsberg
atgggtaagtaacattgtacggaccactggtccttccccaagtgtcaccttcgctttgcattgacggcggagatttccctgtagatctacgaaacaaaatctgaaccaaccaaaatatctatttttaatttccttttattaacatttctctattaccctattttacactattcttttggaataaggtgagaaccctttgttttatcaaatttgcttattatatttaatgttctcagctgtaacagtgaagtacaaatagacctttcttttggcaatagatgtttttggtagagctgagaaccaattgacaactgtgtaatgtattgcgtcgacggatttgtacgcaggatttaaggaaagagaggaagatcgagaagaataa

SEQ ID NO: 193419 - DNA, 202 bp, Arabidopsis thaliana landsberg
aaatcatcgtcttcttcttcatctattcaggatcgatccggcttgagatttattacaaattcgtccttctatttgctccaaaagttcgacaatttcgtaggggcaaagatggacgctgattccaagagatttctagctacgcttcgatcccgatctggtgagaaactacagtacctttatgtcaactttgattttgagcttt

SEQ ID NO: 193420 - DNA, 303 bp, Arabidopsis thaliana landsberg
ccaagcccgcagaactgcggcaacagcacgcaaacgtctacacgctttctgaaagacggcagcttcctggcgttgcggaatatcagcctgagctacgaactgccgcagccgttcgttagccgcctcaacatgaacggcattactgttggcttcacggcagacaatgtgcataccttcaccaatttcctgggacaggacccgcagacaaccatcacgcccggctcccaggtgatgccgggggtatcggatttcaagtacccgaacaaccgccagtacctgttcaacattaatttcagattttaa

SEQ ID NO: 193421 - DNA, 676 bp, Arabidopsis thaliana landsberg
atgattcttctatgtggattgttacttaacccgcaagcaacggtggcatctatgggaatcttgatccaaaccaccgctttgatctacattttcccttcctctctgagtatcagcgtatcgacacgtgtcgggaatgaattaggtgcgaatcagcctgataaagcgaggatagctgcgagaaccggacttagtttaagccttggtttaggtttattggcaatgtttttcgctttgatggtgaggaattgctgggcaagattgttcacagatgaggaagagattgtgaagttgacttcaatggttttaccgatcatcgggctttgcgagctaggaaactgtcctcagaccacattgtgtggagtgttgagaggaagtgcgagacctaagttaggagcaaacataaacttgtgttgtttctactttgtgggaatgccagtggcctgtatggttaagtttctttagcgggtttgacttcaaaggactatggctcggtctatttgcagcacaaggctcgtgcctgatttcgatgctggtcgtgttggctaggactgattgggaagttgaggttcatagagcaaaagaactcatgactagatcatgtgatggtgatgaagatgatggtaatacaccgtttttattggattctttggatatagaagaaaatcttgtcttctag

SEQ ID NO: 193422 - DNA, 88 bp, Arabidopsis thaliana landsberg
accgcacatcatcttcgccgagctccgcttctggctcctcaagctcgcctctcaaacgaatctcgccaactcgtcgagcatcctctaa

SEQ ID NO: 193423 - DNA, 447 bp, Arabidopsis thaliana landsberg
  unsure (1)..(447): unsure at all n locations
atgggtaacgcgatttnnnnnnnnnnnnnnnnnnntatcgccaatgtttcggtgctgaaagggcccagcgcagctgcattgtacggttccagggccggtaacggggttattttgattactacaaaatcgggtagaggcggcaaaaaggggcttggagtttcactcaatacggctatggtgctggaagtgccgctgcgttatgtgccggtgcagaacaagtttggttcggnnnnnnnnnnnnnnnnnnnnnnggaagagcaggagaatgagagctgggggccgcgcctggacgcgggcgaacaatgggtgcagtggaacagtaatggccagaaggtcccgctggtctcgcatcccaaccgtttcaaggattttttccagacagggactaccaataccaataatgtgtcggtaaacggcaattatgataagggcaacttccgactgtcg

SEQ ID NO: 193424 - DNA, 613 bp, Arabidopsis thaliana landsberg
gatcaagaatgctactaataagaaatctccagtagggaagtttcctgcttcctcaccaggtaaattctctctctgattctcacacatatattcacaagcaataagtataataggtcacaacagaagctgtaaaggataattaattaagttttgtaatcttgtcgaattttcattacattatcggatcaaaagttctttgtgtcaccaaggtagttttaggtcctgcagattgtgtaatgtgtaatctttgttttgtgtaatgtaggagattggaggaaaatgtcactcccagcaatgctactaggagagactgtaaatgaaatcttacaagcctcacaggtcacaagagacattgtggacgccatagcaccaaagaagagtagaaagtccaggagattaacaatgtcacaagaagacgatggccctaaaacacccgagacacaacaaaaatcccgggaacagaatcctgaaactgtcagtagcaatatcaaagcaagaaggaagaaagagaagcagaacagacgatcagaatcagattctcctccatctctacaaagggcacgctcaagaattgcgttcagaaccatctctccacaagtaaagggaaataatg

SEQ ID NO: 193425 - DNA, 1326 bp, Arabidopsis thaliana landsberg
atggcgtctagacaaggttttctcacggactggccatggacacctcttggaagctttaaggtctctttctatgcctcttttgctgtataccatcttcaaaaacatccatttatagtccttggttttttatattagccattagtcatgataatagtatgaatacggataaatattgcagtacttgttgttggccccgctggtttttgacagcatctactcatatacaaccatacgagatcacgaaaaacttttgatagtggccgtgacggtgtggcggattgttcatagccaaatatggataagtttatcccgttaccaaactgcaaaaggaaccaagcggatcctgaacaagtccatagagtttgaccaagttgaccgagaacgaacctgggacgatcagatcatcttcaacactctcattgtttacttaaccaaagtgtacgtctcagggaccagtaccattcccttctggcgaaccgatggagtgatcttagtcgctctcctccatgctggtccggtggagttcatctactactggtttcatcgagcccttcaccaccacttcctctactctcgctaccattctcaccaccattcctccattgtcaccgagccgatcacttgtatgtacatactctttctgtttcataaaaactaatgatgaacacttgttcacgttttcacgctttgaaaaaaatgatttcgctattttctaatgattttgatacatcctactaaatgtgtccaacaataactagaaaaagaaagataaatattctaaaatttgttacattcaacattttataattattctaggaaaactttgtccagctagttcgctctgctagttattctgttattctgttattttgctattttttgacatagtagtcatgtcaatgatttttgttactgtttgtttgtttgtttttctcataatctattgattttatgaatttatctgttattttaagtacactttcatagcaattattatggtttagtttcaaaataatatcaaatgaattggaaaaatatatgttcactgtcgtacttatttttattagtatgcgcaacaaattctaaaccttgggtcttgattgtagcggtggtacatccgtttgcagagcacattggattttcgttaatcttggggctacctctaataacgacttttatgtgtggaacggtctcggtagtctccattgccttatacctaacttacatagattttatgaacaatatgggtcactgcaactttgagctcattccgaaatttttattctctcttttacctccactcaagttcctctgctacactccctc

SEQ ID NO: 193426 - DNA, 97 bp, Arabidopsis thaliana landsberg
atgcccgtgctgtatagcacgggttatgatctagttaatctttgtataggggaaaccaagaaaaacatcaaacttactgatgatatcctcgacgccg

SEQ ID NO: 193427 - DNA, 183 bp, Arabidopsis thaliana landsberg
atggttcaggctgagggcatccgtgacagtctgcagaagattgcgcccgaccgcacctttgagattgaggctctgaagacgctgggcgacaaggacaagtctacggcgctgtatagttttggggctaagaacttgtggaccactgagttggaggagaaactcacttctggcgaaatcgacgtg

SEQ ID NO: 193428 - DNA, 334 bp, Arabidopsis thaliana landsberg
acgattttgagtcatccagagggaaaaaggtagatcaactgatattagaagacgatgctcaaatttacattagaaactccatccttgagtcagtgatgagtttttcctcatctcctcttgctgatgatgaaagtaaaggtctaatccttcaggtgctactttcttaccttaatgtcacttggtgtttatcttgcatctatatgcagttgcctcttcagtatcaataatataagcttgattctgagagtatatttgctccatctgttcagacgaaaaccagattctgaatagccaatttgacgtaaaccgcgctttagttggtctatccgaatag

SEQ ID NO: 193429 - DNA, 187 bp, Arabidopsis thaliana landsberg
gttttacatggcttgtccaattttctcccaggagatacatgaagatgtagccatatctccaactccattcgaagaagctaattcacccgcaatggaatatgacatgaagcttccccattactcgcaaaaacagtatgattttctagaggcttgcgttgaaaagccgagctccatatgcggagagtga

SEQ ID NO: 193430 - DNA, 327 bp, Arabidopsis thaliana landsberg
atgaaagatggcaagataacacaagcggggaaataccatgagattctcgattcaggaacagatttcatggaacttgtaggagctcacactgaagccttagcaacaattgattcatgtgaaacagcccatgcttctgaaaaatcaactacggacaaagaaaacgaagtactccatcataaagaaatacaagaggatggttcggataacaagccaagcggtcaactagttcaagaagaggaaagggagaagggaaaagttgggttcactgtgtacaaaaaatacatggcactagcatacggaggagcagttattcctttaatattggtg

SEQ ID NO: 193431 - DNA, 276 bp, Arabidopsis thaliana landsberg
atgagttccggacagacggatgatgccgggcgcgccttcgaagccttcaccacggcctggccgcaatcgacccagacgccggaggcttggttccgcctggggcaggtccgcgccatgaagggcgatccgtccggtgccgtctcggccttcgccacctcgctgaagggctggcccaagacctcctgtgcaccggaagcgactgtgcgtctggcccaggcgctgaacgacagcaaccgtccggccgatgtttgcgcctcgctggcccagttcgacaag

SEQ ID NO: 193432 - DNA, 682 bp, Arabidopsis thaliana landsberg
ggtgatattgactgggagacctaccgtaaactggtcaaagatacattttacctcgtcaacaagaagagtgattcagctgttgcatttattgatggttttccagaatttgtccggaagccaggaaatccattcaagtttaaagtgtttaatgaaagtttggcgactcgtagtcttacacctgtggtaccctctgagatccatgagtctgaaacgcattctgtgatggtggactcttctcccccttctattactgtaacaattgatggcgtatctctgaccatcgtccatgaactttcagaaacaagggacagatttcccctttttcgtggttcagtcaatatcactcagctaactgtacaaatgctatcttctaaagtcaggattatgagcacatcaaacatattagtgctgtactttgatgctcagacaaaccaatggttagtagttttctttccctgggttcttaatatgcgtatggcttccctgatcatgcatttttctagcctttatagaattccgtcaagcaactgtttattttttcttcctttctctctgttgaaataggcgggaatttattcatccagttgaagttagtgctttctaccgttcaacttttcagactcgggatcttaacaatactatgcacaaagtacctacccatatttactgcagaattggaaag

SEQ ID NO: 193433 - DNA, 419 bp, Arabidopsis thaliana landsberg
gtttgtatctccacaccttcttacaacgtcgcttttaatggagagctcattggttttttcaatggaaaaaagggcataagacaaggtgatctgatgtcttctcatctctttgtcttggctatggatattatgtctaaatcgcatgataagggtgtagtaaatggtttgttccagcttcatccaaggtgtgttgctcctcttataacgcatttgagtttcgctgacgatgtgttggttttctttgatggagccgaatcttcaattgctgggatcatggctattctggacgatttcaaagcagggtctggtttcggtataaatagagagaaaacagctttgttgattgatggaggcaactcttctagaactatggaactggctgatcggtttggtttgaagcagggttctctgcatgtcag

SEQ ID NO: 193434 - DNA, 1889 bp, Arabidopsis thaliana landsberg
gcatgaagatttttcaaagagaaagagtgtcgaggataatggggggaagggggagaagaaaacgcgagaagaagaactagaggatgagcagaagaagttggatgaggaagtggaaaaacgaaggagaagagtccaggagtggcaagaattgaagaggaagaaggaggaagctgaaagtgaaagtaagggtgatgcggatggtaatgagcccaaggccggtaaggcttggactcttgaaggagaatctgatgatgaagaaggccatccggaagaaaaatcagaaacagaaatggatgttgatgaagagactaaacctgaaaatgatggagatgctaagatggtagacttggagaatgagacagctgctactgtctctgagagtggaggtgatggagctgtagatgaagaggaaattgatcctttagatgcttttatgaatactatggtattacctgaggttgagaagttttgcaatggtgctcctcccccagcagtgaacgatggtactttggattctaaaatgaatgggaaggaaagtggtgaccggccaaagaaaggttttaataaggcccttggtaggataattcaaggtgaagattctgattctgattattcagaaccaaagaatgatgatgatccaagtttagacgaagacgatgaggagttcatgaagagagtaaagaagacaaaagctgagaagttgtcccttgttgaccactcaaaaatagagtatgaacctttccggaagaacttctatatcgaagtgaaggatatctctaggatgacacaagaagaagttaacacttacagaaaggaattggagctgaaagttcatggaaaggatgttccaagacccataaagttttggcaccagactgggctaaccagcaaaattttggatactatgaagaagcttaattatgaaaagccaatgcctattcaaacacaagcactccctatcatcatgagcggtcgagactgcattggggttgcaaaaaccggttcaggtaaaacccttggttttgttttgccaatgctgaggcatattaaagatcagcctcccgttgaagctggtgatgggccaattggtcttgtaatggcacctactagggagcttgttcagcagattcacagcgatatcagaaagttttctaagccattgggtataagatgcgtccctgtgtatggaggatcaggagttgcccagcaaattagtgaacttaagcgaggtactgagattgttgtgtgcactcctgggagaatgattgatatcctttgcacaagcagtgggaaaatcactaatctgcgaagagtcacatttttggtaatggatgaagctgatcgtatgtttgacatgggttttgagcctcaaattactcgtattattcagaacattcgaccggaacgccaaactgtgcttttttctgccacttttccacgccaagttgaaactttggcacgtaaagtcttgaacaagcctgtagaaatacaggtcggtggaaggagtgttgtgaataaggatataactcagttagttgaagtcagaccggagagtgataggttccttagacttctggaacttcttggggaatggtctgagaaagggaaaattctggtctttgttcagtcgcaggaaaaatgtgatgccttgtatagggatatgattaaatctagttacccttgtctgtctcttcacgggggtaaggatcagaccgatcgtgaatcaactatatctgattttaagaacgatgtctgcaatttattgattgccacaagtgttgctgctaggggtctagatgtgaaagagcttgagttggttgtaaactttgatgcgccgaaccactatgaagattatgtgcatcgcgttggcaggacaggcagggcagggc

SEQ ID NO: 193435 - DNA, 204 bp, Arabidopsis thaliana landsberg
agcggcgaattgtctcgtagtttgggatatagactaccgaagaaagtgggatttagctctggtcgtcgttcagtgagttatatcggtttcggtgcggagaaagttggaagatttagggttagggttccgatttgcagagctgtacctcctctcttgttcaaagatctcgatgctgatgatttccgacatccttttgataagcag

SEQ ID NO: 193436 - DNA, 117 bp, Arabidopsis thaliana landsberg
atgggtctgagccgttttgcgatatcaaatgcaacaaagcagatattgaagctaaactcattgacaaacagaaaccgaacctcatcatcatcatcggatcatgtccctaaaggacac

SEQ ID NO: 193437 - DNA, 292 bp, Arabidopsis thaliana landsberg
atgagttcaagaattgaagtctttgtgctcttgatcttgctttcgttccaattttgttctgtatctgcgcagacaaatggtttcgatggtaatttatagtttgatgatgatcagagtttttcagatacaggaatttcaaagtcgtttgaatgagtttcaaaattgttgcagctgatgctttacaatacctgaagagtagtttgaccatacctcctcagaattggaaaggcattgatccttgtggaaccaaatgggttggaattacatgtagcaatgaccgcgttgctagcat

SEQ ID NO: 193438 - DNA, 633 bp, Arabidopsis thaliana landsberg
atttgtcttgtcaaaacaggatcaactataccaatgatatcaaccttggaactacggccactaagaaatgattcatatttgactcaattcggccccttagacctcatctaccggcgggcctatagtagcaattctaccggttttatacggtatgtaaactcaactttagcaactcttttataaaaaaaaacaatctaacatgattcatttacttttgcatggctactccaaaaatggttttaggtatcctgatgatatttttgatcgcaaatgggaccgatataatgaatttgaaacggatgtgaacaccaccctcaacgtgagatcctcgagtccctttcaagtaccagaagctgtaagtaggatgggaatcacgcccgaaaatgccagcttgccattgagattttacgtgtctctagatgacgacagtgacaaggttaacgtgtactttcactttgccgaaatccaagctttgaggggcaatgagactagagaattcgacattgaattggaagaagatattattcagtcagcatatagtcctacgatgttacaatcagataccaaatataacctatcacctcacaaatgtagctccgggttgtgctacttgaaactcgttagaactccaag

SEQ ID NO: 193439 - DNA, 68 bp, Arabidopsis thaliana landsberg
ctctgcaagggacgcgacaagaactctacaaaggaaacgtcgaatccagagacaaagtgactggatga

SEQ ID NO: 193440 - DNA, 923 bp, Arabidopsis thaliana landsberg
ttcgatatttgttctaaaattctccaaagagttaagaagactcatcgacttcaaatcaaggaacggctcaagattcgcatgccacaaggagaaaatgaacaagtcaagctcatggagcatatacagtcccagagagggagatagtgaagggccatggagatcgtcaacgtcgatgaatgcgatctcatttgggtttgtagcgacggcgatactcatctccatgttcttgatcatggccatattcgagcatctctttaggcctgagaattcttcatttgattcaccacatcagatcagacaaagacagagagatgggtccagtcagttccagaaacttgctgatcaagcatccatggtaaacacaaaactaaataaaagttattaaagcatttctcaaaagaatttttgtcctttttataaagccgagccgcattaacttgccactgttgagtttagtttttcgtttgtttctgcaaaataaaattgcttttcttttcggtgcaaaaacctttgaaaagtggaaaacattcgtcaaaattaatacaaaaaatataacccaactttggaaagtgaaaagcaagacacacaagttgtagtttaattctttgctttcatatagaatactttttttccaaaacatctttacgtacttgtagaattgttctttgttttatagaattaagtcgcaattaacttgttttaagttaatgataaggaatgtaacggtggcaggttccggtgagtacggtggtggatgtatcggtagtgatgccaggggagaagttgccgtcgcacatagctttgccggctccgttaccttgtcggagagaaggcattcattggcctctccacctctaaatattactatagcttcgtcttctgtaatttttatttatttatttctgactcgtaaagtagattag

SEQ ID NO: 193441 - DNA, 99 bp, Arabidopsis thaliana landsberg
aaagccatgggagtgctcaaggctaagcgagatgacgtgcaaggaaggataaatagagaagagtttacggggcatcgtcgaaggcttgctcaagtccag

SEQ ID NO: 193442 - DNA, 210 bp, Arabidopsis thaliana landsberg
attctgaagaaaatatgtgaccacccgcttctcttaactaagagggctgctgaggatgtccttgaaggaatggattcaacattaacacaagaagaagcaggcgtggctgagagattggctatgcatatagcggacaatgtggatacagatgattttcagaccaagaatgacagtatctcttgcaaattgtcatttatcatgtcgctactg

SEQ ID NO: 193443 - DNA, 342 bp, Arabidopsis thaliana landsberg
atgacggtccacaagtccgacagccctctagtcgacgtcgtgacgtcccgacaacccgcaacccgactcagcctggttcggttcggtccggtttggcccaagtgtcccactttacacctttatttctcattcaatacaacttcatttttgacgtatgtgtataccattttgtagtactctttactagctttccaacgcactaatgaccctacaattccgttcagccgtttggccggaatttggccggaaagtcaccggaaaagttttgtcaaaaaagttccaacaagtttcatattcaaatgttgtatttcatatggcttttcctctgtgtgcgccatgtga

SEQ ID NO: 193444 - DNA, 67 bp, Arabidopsis thaliana landsberg
gttcctggaaatggaaattaaacagatcagtgaagattatgaaaggaagttcgagaaattgcgatga

SEQ ID NO: 193445 - DNA, 292 bp, Arabidopsis thaliana landsberg
atgaaaaaatacctcttctccctttccctggtcctggttgcacatgcggccatgtctgccgtctctaccgtgtcgggcactattaccaacggtgaaggcctcaagctctattttgaaaaatatgtcgaaacaggactggtcaaactcgactccaccgtgctcaccaaagccggtaaattcagcttcaaggtcaccgatgaccaaaccaattattaccgcatttccaccaaacccaccgattttgtagtcgctattgtcaaaccgggtgaaaaagttaccattaacgccaaag

SEQ ID NO: 193446 - DNA, 261 bp, Arabidopsis thaliana landsberg
cttcatgtaatccggcaaaccgcagacagtgtggtacgatttaatggtttgggacggcccaccattcacagataccgactcgataacctctgggtaaatagttaccctgtccaagccagccgagcatccgtttacaagcttctaattcttggtcgaaaatcatccacagtcagctttatccaatggctgtgcgctttacttcgggatcagtcaggccgctcaatacagcgtaatacttaccgcacgcgtcaactcctttaa

SEQ ID NO: 193447 - DNA, 1097 bp, Arabidopsis thaliana landsberg
atggagaagaagatgaaagaggaggaggaggagccactgagccctatggctcgggcatttcttgagccgagcatcgactgtggtattgtcataaagttcgggtgcaaaaccaagatcaaccctgacgtcattgttgattccttgaagcttaatgttttcaagcatcctcgtttctgcagccttttggtaagcaggataattattattattttctaatgaaggttatacattttttgaaaagtgttattgatttacttaccagcttcttaatacatgtgcttccaaatattcttacatatttagcttatttaataggacgatgatggtacaaaatggttaaggaccgatgttgtcaatgtagaggaacatgtatttgtaccagacatagattcaaaattgacagaggaagacgttgaatggttcgttgaggactacatatccagtataacgatgattcctctaaacagaactaagcccttatgggaagttcacatcctaaacgctaaaacctctgacgccgaagctatatgtgtcataagatgtcaccatgcattattgagatggagtgtctatcttgtctctcatactagcatctacccgaaaaacatcggaacccgaggcattttctaccctccctgtcccaaagtgtcgtgaatcttacaaccatagacgcgggttctcattctttagattggttcttgtggtttgttccacagtgagattgatatggaataccctagtggattcctttttgtgcatggcaacaatatttttcttgaaggatacagatacacccctgaagggtaagcctggcgccataaagaaattttctcaccggattgtgtctttggatgacatcaaacttataaagaacgctatggaaatggtaaatacgtatttgttacaattttccatattgtattctcatgtgaaattttcttgaattattcttgatgctcttccacaaacgatattgtgggttttttattgtctaacttctcatgtgcacattgtttctttacaagactatcaacgacgttcttctgggggttacagaagccgctctcacacgctatctgcaccaatcaaatggtatg

SEQ ID NO: 193448 - DNA, 109 bp, Arabidopsis thaliana landsberg
atgcaagcgatctaagcgaaaaacagatgttgaaattcgtgatagcgctgctctcatatttttcctgaccattgccattagtctcgcacatgcttttcgcaacttctaa

SEQ ID NO: 193449 - DNA, 70 bp, Arabidopsis thaliana landsberg
atgattgtcaatttgttattgaaaaactacgaggactcacccgcaatggtgaatatagaccatgatggtg

SEQ ID NO: 193450 - DNA, 214 bp, Arabidopsis thaliana landsberg
gttcattgtgagactttgactgatggattgaacacattaaagccatggaagtctaagattgcttatgataagcttgtgatagcaagtggtgcagaggcttctacgtttggaatccatggtgttatggaaaatgcgatcttccttcgtgaagttcaccatgctcaggagattcgtaggaagctacttttgaatctgatgctctctgatactcctg

SEQ ID NO: 193451 - DNA, 395 bp, Arabidopsis thaliana landsberg
aactttcaatgagtgtcaacatccagatgacaaacagaggaaccaacttagtatagagttgggtttagctccaagacagatcaagttctggtttcaaaacagaagaactcaaaagaaggtttttgttttgttttaaagtttctctctttcttgttctgtcttcatagaagtctcttaattttgcttctctgtttgttttgttgcaagcacaacacgaaagagctgataattgtgcattgaaagaagagaatgataagattcgacgcgaaaacattgctattagagaagctattaaacacgccatttgccccagctgtggtgattctcctgttaatgaagactcttactttgatgagcagaagctttgcatcgaaaatgcacagctcagagatgag

SEQ ID NO: 193452 - DNA, 293 bp, Arabidopsis thaliana landsberg
gaaccattgaaggacgacggaaattagaagacgaagattttggggtttgctttgatgcagtgaagaaatgcggatacggagatttactaatattcgaattcacaacggaagtacgccgcggcgttttgaaattggatatgtcactgagtaacgatgacgtcggattacgtggcggcaccggtgaagcgcacggcggttcgttttcatccatcggagatttgttagagagaaagagtcgtttgttcaaattcaaaattcgaaagacagtaaacactaaaaggagtgaacactaa

SEQ ID NO: 193453 - DNA, 1414 bp, Arabidopsis thaliana landsberg
  unsure (1)..(1414): unsure at all n locations
atgaagaagacaattgttaaggttgagattgtatatagtccaaaacctgaggagaagaagtaagttgcagctccgacaacaaagacatttgatgatgatgttatggatctgacaaggttattgcagacaatctgaaaatagcttcaagttctgaagaaatattctccaatcttctagattgaatgggtaataaggcaatggctgatgcattgagagcacttcaagaaggactagagaatctagacggtgttactagtaagagttgatgagtgccacagctagcgggttctcagaaatatccgtatgtaggaaattcaatagtgaagcgcataatctctgatgaaccatcgtcttcttcggtacctgaacatcttcaacctgtttttgatgaccaatttgataggctgtaggattggctcaaaccagatttgtaagtgtctatttttcttcacatagaaatgttttgtgctatcattactcattcttttcttttctgcagtgaaaaagaaggcatgaacaccagcaactttaannnnnnnnnnnnnnnnnnnnnnnnnnctccaagaagcgattggtcaacagaaaaatatggatggatgaaagactatgtaagtatagcaatttttaaagttttttgctttcaattgattaaatcatttactgttagctggctgaaactatatgtaactataataattgttgttttgattataatgcagcacatgggagctgcaatgtcattgtttcgccgaagattcaatcgtgatccgtcaaaatatcccaaccagagaatagcttttttggaccaagatttgatctccacaatgctcaaagactataaacagtttcaaccggattataggtgcttcaaattcagggagcattatgaggatcaagtcaatggtacagctcaatgtgacgcggcgaaaaacaagaaatggtttgttgatgtggatcacctatatgcatacctctttgtcaacgggaatcattgggtcgctctagacattgacttgccaaaaaaacggatcaatgtttatgatagcatcccgagcttgactacggatacagaaatggcgatacagtgcatgtttgtgatgacaataattcctgccatgttgagttcatttattccgtcaaagcaacgtaggaggagctactcaaagttggagtggaagaggattacgaagatcccggagaatcttgacgcaggtgatgtgctatctactcaataaagtacatcgaatgtttggcgtttggcaagtcctttgatggcttgtgtgatgagaacatgcagtccctatggactaaacttgctgtggagatgtttgaggaattaggcaagaatgctggaacactacactctgaggttcgtcgcaaggccttcaaattcccaagcctcatggatgattag

SEQ ID NO: 193454 - DNA, 1052 bp, Arabidopsis thaliana landsberg
atcattttaccgagcttttcttcacacaagtctatagtcaaatcagaccaattctgcaaaaagtttaacctctgtcaagaagtgacggcccttgcttcagaattccatctaggaaactgcgaggcttggcgcgagactgtcaccaaactcaaggatcctgagacaaaggtttgcaccttcctccactatcacaaactttaattttgaattctcaattgagatattgccttgcagctgaaactccgcatatctctcaaggtatgcagtcgctaaacaattaccaggaaaaggtagctaactaaagaatgcacgcaaagctcaaagtgcctcaaacatattaatgattttcttagctacttcgataaccatttttgccatctcctgtggtacttttatggatcagattatgatgtgtttgtttatgatggtgccatcttttgtggtactttttatggatcagattatgatgtgtttgtttgtgatggtgaatagtgcttgaaggtggtgtttgagtacacggcctctgatgcttgcggatatggataagtttctggaaaataaaagcctatgcgtctgtccaggtcaaagtagtagaaaagatcttgttctggtccccagggtgctacgaaatttggttaccaggtacttgattttataatgtttaaggctctttaagagttatggtttctgtttttttcattgtattttcggttctattgggtaattaattactttctgatcaggggaatcaacataatacacacagaaaaaggctctggttgtggatgacagtaacagaatcccccaatcttgagcctcagtgataatattgccaaaatctcgtgaatatgggagaccaatcattcttttagtgcatcctgctaaggtaatttgatttaacggtagcatgtttcttcctgttaaatattctttttattttaacaagggttctttggtgtcaagagatatttcaagctgcaaagaactcttgacaaagggtttcaagatgaagaagtgtttagctgcaaagaagatctgaagaccattcaaag

SEQ ID NO: 193455 - DNA, 1109 bp, Arabidopsis thaliana landsberg
gtccctatttgcagcttagtctcagtgcaaaaccctcgtcggaaggcgtcgtcaacatcggagaaatcgttttgtacgaccctgctaaacaagagttactcaaccttacggacaaaccaattccagaagaaatcgtgacagccaaatggatcggagcttccaagggatgggcattcttcttggacacacaagaccgttgtgtactcatcaccgactctttgaacccatgggcatgcaaatcaaaccccaagctcttaactctgcctccacttaatcctctgttctcttgccaaactgatgtgatctggaacgtggcaatgtcctcttgtcctgatgacgatgaagactgggttgttggcatcaagtccttgggtgaccaggtgagtttctgtaggcctcgtcgagacttgcgttggactaagttccaaaccccttctgaccactttccaacctcgaatctgacgtattccaagagagatcggaagttctacttgcctggtcctggaggccatcacttgttatcctacgatcttgacttcaacaaagccgaccagccagagttccatgagttgcagtttcgcaactttccagagtcgttgaagtatgactcagagctgtcggagctgtttccttcttcttgtaggacggaacgctttgtggagtcaccctccggagatgaacgtttccttgtcaaatggtatatctatattactttatagctactaccagatgaattatacatgattactgaaccatctatgcgttggttttttgcatgcaggtacgccaagggttgtttggcttattcgagtaaaatcacctatgaaacgcagaggttcatggtatttagagaggaggagactacggaagaaagattcatgtgttacactgatgacattggagatttgtgcatctttgtttcaaagagcgaggctttttgcgtcccggcaagctcttatcctggccttaagccaaactccatctattttgttggctttggcttaggtatatacgatcttaccaccagagatgtctctatttttcgagctcccaaagatgcactgaatcaaattgtgtccccttactggtttcctccagcttctagctag

SEQ ID NO: 193456 - DNA, 288 bp, Arabidopsis thaliana landsberg
atgcgtattcatcgtatagggcaaactaaggaagtcaaaatcagaagattcatcgttaaggtaccctcttctttctcagcagttagtccccattaaccatataaagaccaatcactgaaactattccaaaatcagaaaatgttgttgctgagtaatgatcattagaaacttgtatgtcttgcctttgtgaatcctagggaacggttgaagagagaatggaggcggttcaggcgaggaagcagagaatgatctctggggctttaaccgatcaagaagtacgaagtgcac

SEQ ID NO: 193457 - DNA, 147 bp, Arabidopsis thaliana landsberg
gtacaacttaaccccggcgttgccgataagcccggcagcgggtaccgctcggccttttcgcacgcgaacgaggtgagcgaggccaactattacaaggtaaaacttgatgcgcacaacatcatcgccgagatgaccaccaccacaagg

SEQ ID NO: 193458 - DNA, 1187 bp, Arabidopsis thaliana landsberg
  unsure (1)..(1187): unsure at all n locations
atggcgtttacatcgaaatgcattctgaggtctttgatgaatgcaatggaggaactggaactgaatgcacataatgctgccatgaaaccagaccacgcacatatgttcctatgcatactacgtgagcagcagatagatgatcttgtgccttaccccaggtttttatggctctgtcttttacaagttatcatttgcgatgtgttagaactttatagtaacaatgttcaaaatgtttctctcaggagatttgaagtgaatgcggaggatgaagaaactacagttgagacgatcttagaagaagcaacacaggaaatacataggtctgttggagtgagaatgcatgcattgggtgtttgcgaatgggaagtgcgactgtggttggtgtcctcgggactggcaaatggcgcttggagggtcgtggttgcaaacgtgactggccgtacctgcactgtccatgtaaattcagcttacaaatagtttgttgttggtaacatacataggtacacttctccaaaccttgactctctgtgattcatgtttcagatataccgagaagtggaagctactgggagaaacagtttaatctaccactcaataactaagaagggacctttgcatggaactctgatcaatggtcaatataaaccacttaataatctggacaggaaacgtttagccgcaaggaggagtaacactacttattgctatgacttccccttggttagtaactgaattctgaagtttcacacttagtttattcttttggctgtttccaacccaccttatgttatttcctgtctcttcaggcatttgagacagcattggagctgaattgggcatcacaacactcgggagttaggaaaccatgcaagaatagactcatcaacgtcaaagagcttgtattctccaatacagaaggttctttgggtacatctcttattccggttgaacgaccagctggtctcaacgannnnnnnnnnnnnnnnnnnatcttagagatgtcgactcctgagtttcctatgggacggaaacttctcattgtcgccaatgatgtcacattcaaagctggttcttttggtcctagagaggacgcatttttccttgctgtgactgaactcgcttgtaccaaaaagctttccttgatttacttggcagcaaattcttgtgccccgactcggtgtaactga

SEQ ID NO: 193459 - DNA, 1116 bp, Arabidopsis thaliana landsberg
atggtgaagaatggtcgagatcctccggagagaaacttctactgtacagaaaaagaagaaactgcgccaccgttaatgaacatctttgatgattttaagagtcagatagagcgtgaaatcatgacgatatttctaaagactgcctatgaatcactgctatccatagcgatttcaacggaaatcatcgtcccagaagatgaaacacgatctttggagaaagaggttattaagctgatgaaactgatgaatcttcttgagcctcttggaaacagagtctctcgtttaatgggtcttgtgcgtaacgctgaagaacacagagaaagaatcgtcaaacgcaaccaagaatagatgttagagagatattcacaactgcagccagtagcactaagactcggttccacaaggctttgcaaaaggaatcatcatcttcttcaatgaaatggggttttacagaggctaaagatgaagtactttctcttgggatcaggttaactcatgcgctcatcaaactcacgttattgcgtgttaataagaacgacagagagaaaacagttgttgctaagagattggatctttgatgagtcttacgagaaacaatctgctttaatgtacttgttggactatcttctctacaaggccgaagagttcgcagcctctgttgttgtggaggagagtggcaatgatcatcatcgtcaacatattctcgaagaagataggatcggagatgatattcttacaagaatttctgaagcaatcttcatcttacaattgctagccatgaatctttcgagaaatgttcttacggagagagatttgattgctacaaatgatcagcttcttcgatgcgttagggatgtgaaatttgtggaaagtaccattgttgttctgatgaagggacgatctcttaagttgaagcataaaggaaaacagagtttgctaatgaaggagagaactgagactatcttctgggcgaaagtgaatgcagagctgaacaagtgttggggtgagtctttctggaagtatgttgaagcagcaagacacttggaagctgtggtttcaagtcaacaaatcgtctatacgctctgtaagttgttcgttttcgggtttgaatcataa

SEQ ID NO: 193460 - DNA, 343 bp, Arabidopsis thaliana landsberg
agcttccaatgccaacaatggaagaaagaaacagaggaaaacttgctgcagatatcatcagaaaaaagcataaaaggcatatgcgaagaagaaagccattgcgtaagaaattaaaaaaagtaacgtcatcgtaacattcatccaatttccatgattctcgctttttggctaaaagagaaaaaacaaaaccttgtgcgcatgttgggattcagacacgcaacttcggacagagaatctgcagttccgagatcgattaatgttcaaattcttcgagcttttgaaattgactgaagcagcaacgatggttgagctgaaacgaatcgacattgactacaaggagtaa

SEQ ID NO: 193461 - DNA, 374 bp, Arabidopsis thaliana landsberg
cggtgccaatatcgtcggtgctactggcagcagcctgactatcaacaacgtttcggatgcggatgaggacaattactccgtcgctgtaacaaactcgcttaactccggcttggttagcggcttggcaattttgaccgtcaacgacccggctatcatcgctcagccagtcaccgccattacgggccccggtagcaatgctgtattcaacgtcaccgccatcggttcaactgcccttacttatcagtggaatcgcggcggaacacccatcagcctcgttgactcgcactattccggtgcggataccgcgagccttaccatcctgggtgctgccgaccctggggatcaccttgctgaattctccgtcaccgtcaccg

SEQ ID NO: 193462 - DNA, 256 bp, Arabidopsis thaliana landsberg
atcgtggccatgagggatcaggtgccggcgatagagcgtcggtatgatccgacctccattaatcatgaactagtgttgatgggtcaaatcctagatgacgtggatgacgtgcatgatggtctagaggatctctttggttccactacccctacccctaccatcaaccttggcgatgacaatgtcgttgtcgagggtgaggctctcctagatggcagtggtgttgctactgctactgcctccactacgacaagcacgg

SEQ ID NO: 193463 - DNA, 489 bp, Arabidopsis thaliana landsberg
gaagaaaagtcccatacgaccctccggtgccacgtggcatctgattcatcaccggacttgcccccgaaagcctataaaccgggttcaagggaggcagttgctgcgacggaagcggctgaggctgaaaaaccaagtccacgacgttgccaggtgctccggcggctgatgtggacaaaccataatgtgccaagtcagcattagctgcgtcgagctccttctgaagcctatggacttgtctctggagataagagatggctccgacgcagccatagacggggtcacggacacgtgcctcggcctcataggctaaggagttgactgcgtcttcacgttggtgagggaggagctcgttgaggagcttcgtgacgttgcttgctccaaagattttgtggacgttggcgaatttgtgtggctcctccggtggaaaatatggcgcgaatatgcatcccggcatgcatttccggcgaagaaacttgcacgccgcgcatg

SEQ ID NO: 193464 - DNA, 499 bp, Arabidopsis thaliana landsberg
ctctcgagtaatgaagcatctttcagatcagaaaggctctatgtcaacaagctaaatgtcattttggtccaggtatattcagcactccctgataataatattcaatgcgtttattagttgcacttctcttgtctctttggtttcagtagctgatacttacaaacttcattccaacccgtagacttattttatcttctggcataacatatgttgtgataaatgcacagatcgtgaaacatgattggccggcaaagtggacaagcttcattcctgatctagttgcagctgctaaaactagcgaaactatctgcgaaaattgcatggccattttgaaagtaagaatctttacatgatatcataatcagttctcactggaatattttaaacattttcttcctttatttagctcctaagtgaagaggtttttgatttctcaagaggagaaatgactcagcagaagattaaagagctgaaacaatctctaaacaggtctatttga

SEQ ID NO: 193465 - DNA, 108 bp, Arabidopsis thaliana landsberg
gaatgcaaaagcaatacagaaagaccgctgagctacgtcgacgccaatcatatcgaggagcggcatgccgtatttattcgtcttatacgtacagtcgaggaggaggag

SEQ ID NO: 193466 - DNA, 303 bp, Arabidopsis thaliana landsberg
ttaaaacgatgcaataccactaatataccaaacgacgacgtatcgacatttccattaatctcggattcgctcgcgggacagagcagtgacgatggaggagcgagccagatgcgcatcgtcgccaacagatctgcaacaactgcgatcgaccaaacgcgatttgtctccgccacgtcataccggctgatccaattccgaagaatacagagagcatcatcctccaccatccgcacgagtataaagcttgtgctaaggaaggaaccattgggaggatatgtaactacggcgcttaggagccattga

SEQ ID NO: 193467 - DNA, 369 bp, Arabidopsis thaliana landsberg
aaagacatcctccccgccaagcgccagcgtgccaccgtgcaagccaaggtgcgccagatgatacgggacgaggagcagagagcccaggagctcgagcaagagatcacgctcatgcagagcgaaagccagcatgatctgcagcacggcccacccctccaacagcgcgcaccagccagagacttattcaggctccagcacgggcccttcgtcccgcatgccgcagctttccaaggcatcaattaccttgatgagcgaagccccctagcttctcaactccaagcatcaccgtggcccaccaacttcaaggcagggacctacccaaagtacaacggcagcaccgacccaacacagtacattatgagctaccaa

SEQ ID NO: 193468 - DNA, 409 bp, Arabidopsis thaliana landsberg
atggagacatacttgaagaaaacccaaaggagtgcgacgaacagagcgatcgtgaagataaacatgacgaggaaagctgccatttccggaggatattacaatacacatagacctaggaaactcggcggtggttttattccgatcagcggtcgagacgaagcagacgcactggggtcatagctcggaagccaaaaataaaatgtgaaaaattggagagagagaaagtgtagaaggttacgactgagtcatttgctgttagagagaagatggaagatccgaggaagaggagagagcgtgggagcgggaacgaagaagaagacgacgacttttccgttttctgaggttagaagaagaaataatgatcctctgtggtagagtgcaccgttatgccagggacgtgcgtgcatga

SEQ ID NO: 193469 - DNA, 230 bp, Arabidopsis thaliana landsberg
gtattgtaaggctatatgttcttcgtactttacctgatctagagcaatggatgcaagaaagagaattgttgtcagagctcattaaacaacagttgttgcgtgctcaacagagaatgaaacatcaagcggataagcatcgatcagagaggagttttgacattggagatcgagtgtatttgaagcttcaaccacatgtgcagtcatatgtggccttgacgtttcgctgttaa

SEQ ID NO: 193470 - DNA, 1274 bp, Arabidopsis thaliana landsberg
atggctgcgaagcttctgcattcattggcagatgatagtgcagatctgcagaagcaaattggatgtatgaatgggatttttcaaatctttgatcgtcaccatgttcttactggccgacgaaaaagtcttactttaggtaaattaataattactatatatttatattgtttgataatttaaacactctcttctgatctctatggttcgtgtccagtagtcgttgacttgtatatggtcacatatgttattcttacatccatgtgtttttgtatgtttattcttctctgtttttgttttggctctttatctgccaatggagtgattctttcattaaccaggtcttgttatagtctcagagatctaaagttatggttgttactttttctttctcagatgtgttgatctgccgaatcttttggttagatttaatttttcccttatggccggttttttcttgctagattttgacttttattaacctttaggctcatggagtttccaaccagatgtgatgaattcaagtttgactagcaggttcttgaaggttttattaaacgtctctctcaatgcgtaatcgggtgttccttgtttgagagttttgatatgatgctcatgcttgttttatgtgcttgttgcaggtaatggaaatgccattaacatcaattatgaaagagactctgttgatacaatttatcaacaaaaagaaactgtaagttggttcttttgccaaccatctacgatttcattcatatacagaggttttctataagatctaaggttcttgcatttcagtttcaggactccaacattggtgggaatgtgaaagagaagcgaagggtttcaacagaatcatctagagtttctttctcatcttcgtgctcttcctccccatcgtcttctgagttcaatagaggagttcaacctgacgcttctgcgtatgaccgagctaattttcaagaatctcctacaagtgatcctgagatgactgaagggaatggattttcacatttgggacttcacctcagagatgttgtgagagactcaatgaacagagaagccagagggcttttgagtaagactccaatgactagagaggaagtagttagacagagcatacgagaggattctccaaggccttatggtttgaagcaatcaactcccatggatctcaaagagtccttcagagttctagcaagacttagagaaacatctcaacattataacgagcttggcatgaaagatgcgcctcgttactcagttgattctcatgatac

SEQ ID NO: 193471 - DNA, 1104 bp, Arabidopsis thaliana landsberg
catatccgaaaatagcaccaatgaggaaaagtgagagagcttgctgtccaaaaagtgtatatatttttattcaatttttttaatgctacttacaaatgatattgaaaaataaaagaaactagatataaataataaaacaagtggatggaatgatcaaataattgaacaaacaattctccatagttaacacttaacactattcaacttaactgaaattaatagtttgaaagcgtggaggcttttggtgtggaggcactgagagttttctttgcattttattgcaaatattaatatcattatttactaaacatttgttggagagattgttggttatgattgatgagctcatcatcctcggcctccatcagtattcatcaacttgcgaattaaaaatatatacaaaatagcataaccttaatttcgaagacatgtcacatgatctcacacaaaattcttaatcccacaaactaccaccaagttgtatataggtcggcaagtttttttcttttttcaagttaatttcggatgtatgaacgtatgtgcatacactttacagtatggttttgaaacttgaatatcaaaaatttatctatggaaattactccttagcaaatgatatctgagtaacaaagaataatagtattttgtaacacgcacaaaaatatgaactagtggaatatattaaaaacgatgtctccgttacttcgcctatactgaaactcgcttgagttttaacaaattaaaggtaaaaaatatattacgcttcgcacatgcataaaataaaaatgactgcatccagatcatccgaagctctctcggtaaactagcactttagtgtgagatcagcacctaacatttatttgacataggtcaaccttgacccttgaaatgtggaacttggacttttgacctcattttcctcaacctactagaaaaatcgaccggtataaagaagctacatatagcattctattccaattaccaactcgaaagaagaagaagaaaaaagagaaattcttggtcttttctgaatctttgaaaaagaaaatcaataattgtggggaggacaaaaaaagagggtttgtttttggagatgccacttaa

SEQ ID NO: 193472 - DNA, 739 bp, Arabidopsis thaliana landsberg
caagaatttactacttggggaacaagttatcaaatactacttttctaagaaaagaaaaactactagttgcaattttattccaaacattgatgtgagagtgactacaccattaataaatcgtgtgaggcgctattcagatttttcatttttcgatgaagtgtggatttgttttgtcatttttattgtaagtttttgttttggtgcacataaatatttaatttctattaatttaaaatatctgctgaatgacactaattattggactcattaattcactcgatagattattgacatttttttcagtaggcgtagacctttttccgggggaagaaaaaaagtttaagcggttcgattcccactaaccttttggagaatcgtgtcacgtgtcgaatagacccaaatcctttaccctacatgtttgaaactgtataaaattcccgacgtaaataagacgatcttgacccggcccgagaacccgaatctatggattttgaatttggaaacccaacctacaaattttttatatatcccactgacaaagccgttactagcccatgggcctaattacttcaaagaatgctcaacttttgatttttaatagagaagaaaaagtttgaaactttatcatatattgacttgtcttgttgctctctagagtgcaatcataccattgcattcacaaatcaaaacaccggttattttccggttcaatctcaatcagggtttcaccttggtttaa

SEQ ID NO: 193473 - DNA, 254 bp, Arabidopsis thaliana landsberg
aagctccaagccgaacgcttaccgtcgtgggggtcgtcgccgctatccactgccggagggtgctccctttggtagagcgacggttgcagctttcggaaatgaagccgggggtcaatttggagggttcacggatgtcaccgacccccctctccaccgacgacctcctcagacggatagcgggcacgatggtgaggctggacgctggcgtccttaaccagcccccgatgcgtcccgaccacgggtatgtgtccctg

SEQ ID NO: 193474 - DNA, 340 bp, Arabidopsis thaliana landsberg
aagtactaatgttgcaaacccacaagaccaagtctacccttcacagcagcagaatcaacccaagccttttgttccatacaaccaaggtcagcggtatgttcctaagcagcagtatcagggcacctatcagcagcaacttccaccacctgggttcacacagcagcaaaaccaacaaccttcaccaattccagatacagacttgaagaacatgttacaacagattctcaagggacaagtagtaggagcaatggatctcgccaaaaagatggcagaaatccacaacaaggtttattgcactttcaacgatctgaacataaaacttgaggcacttacctctaag

SEQ ID NO: 193475 - DNA, 1709 bp, Arabidopsis thaliana landsberg
atgttgattcatcatcttcgtcctttttcaactgcttctctgtctcctcgttctctcaccatttccactgctctctcttcttcttcgacgaagcaacaacacaagctttggtctggtctcgaaaactggagaaagagtcctgtcaacgacctccgtctctggggtcctactggtcctctccttccttcttcttctgactccatctccgccgacttctacggtctcgtctcagctgcatcttctctcgctgatctcggagcactcgttctctcaacctccgatcctctctccaaatctcatatctcccatttagctttctctcgttggcgccgtgagaatctccctgttggctcaatctctcatcttccttcttctccagctcgtcctcccaaacctctcctcgtacgtgttcctcctctcttttttctctcaatctgatttgatcaaattagctaaatttgtttgtattgttgcaggttgcgaccaaccaagtcccaaatccgaaagactcaaaccttcctctcaatgctcatatgcttcataatctagctcatgttgagcttaatgctattgatttggcttgggatactgttgctcgtttctctcctttcttcgaccttttgggtcacaacttctttgatgactttgctcatgttgctgatgatgagagtcgccatttcttgtggtgttcccagagactcgctgagcttggtttcaagtctgttatatttttaaagtttcaaacttttgattactatttgtttcaggacaaccattaaactcttaccctcttcttcttcaaggtatggagatataccggctaataatttgctcatgagggaatgcgagaaaacttccaacaatgtcgctgctcgcttggcttgtatccctcttgttcaggtactgccccacttatctgatatggatgataccacaaatgagacaccagtttgttttaatagcattattcataccaatttagttatacaggaggctagaggacttgatgctggacctaggttggtcaaacggctgacaggatttggagataacaggacttcgaaaatcgtggcgaagatcgctgaggaggaagttgcacatgtagctgttggtgtagactggtttctctctgtgtgtcaaaagatgaaccgtgctccttcccctacatttaaaggcatacccaagtctttttttcatgcttctatatctcatcttttacccgctcgttttatacaaatatcataaatatgttttcaaccatatgtgctgtgcagatctgatcaaagagtatggtgtcgagttaaggggccctttcaaccactcagctcgggaggtagctggcattccgcgagattggtaaggaatatcatcccaccaagttacactctttcaagaactggctctatatcaacatttcaagttagcgtaacagattaaatgggcttattccatatatctttaggtatgatccatcatgtggcacggaagtggataaaggcaataacgaacagggtgacaaggagcaactctctgcagtatgtttcttctttgttcatgtatcatagctatgcttcgtggaggaggcaaattcttgctgaagattatcttaatgtatgatttttgtcacatcacaacaggtttacgataggctcactcacattatctcaatggagagtgagaattcaagtcttgaaaagcctgccaaatga

SEQ ID NO: 193476 - DNA, 113 bp, Arabidopsis thaliana landsberg
gattatttctcgctcgagctaaattgcttagagagaggctctctctatcagcggaaccaagagagagagaagaggatattgtgtgggttgccttttctctccggtttttttaa

SEQ ID NO: 193477 - DNA, 147 bp, Arabidopsis thaliana landsberg
atgaacgattctatgaacaacttccacaacgtgcaactctcctctcagctattggatctccaactaatgattcttatctacattatatcgacgatggacatctttactttagcacatgataccacgacggatagttctttcgataag

SEQ ID NO: 193478 - DNA, 109 bp, Arabidopsis thaliana landsberg
atgaagttttgtaaatccctgcctgcgctgctggtagtaatggctgccacctttgcctcctgcggaaaattggatatggctacgcccgataccacaccggtgaacccag

SEQ ID NO: 193479 - DNA, 313 bp, Arabidopsis thaliana landsberg
atggaagatttggttttgatgaaacagagtcttctaaaaagcttcatcgtctctcttattctcactctcgtcttcctcatctcaccatcatcatcatcttcgaatcaagaaacaagagtatcatcaacacaaaaaacggaagcttatctcaacggttacgaatcaccgcaccaactcgtctacatcaagaaaacgacaccgtttatcttgaaccagcggttgcaacgagacaaccaccgtcgtcgtcgttacaatcaccaatactactactactatcgacatactcttcgtcatcgccgtggtcttcatcatc

SEQ ID NO: 193480 - DNA, 390 bp, Arabidopsis thaliana landsberg
atgccggttgtggatctgttgcaggatgacggcgtgtggcgcgcacggatggatgcgctggtcgatgtcggacgccgggccgtggtggagctggcgttgctgctggcgttggtggcggtgatggtggtcggcaacggcgtgcgcctggacattcgcggccgcgcggacgagattgccgtgttgaagctggtcggcgccagccatgcgttcgagcgtcggccgtatttgtacgcgggattgtggtacggcctggctggcggtagtgtcgccagttttttggttttggtcatggaaggtgcactggccggtccggtggggcggctggtggccagttaccgcggccatctggccgtgggcggactggctggatggcaattggcgctggcgccc

SEQ ID NO: 193481 - DNA, 853 bp, Arabidopsis thaliana landsberg
atgagagtgtttgatatcggttttcggggaggaggttttgatgaagtacttggatatgtcgagggagaggaaggtgcaaacataattacactcaagtaggtagatgaagttttagagtaacagtatacttcatgtcgctgcaggttctgatgaatagatttaggaataggtactgtcactttgaagattattacttgtctgatattttcattagccttcattgttgccttgtgaatcttctaggtaaccctaggttctgtgttggatccctaaatcttttcatctcattttggttgtttggattcttactctgtttcaatatctcccaagagtatgattctaaaatccttttcttcttttatacattgggatgtccaaaccgaacaaacaacgaaaaacgattgtagaaccggaaaatctaaaccgaaaccgagatttgatatccataccacacttgcatgatttgaccaaattggctcaactgaaaaagtgagtctcggtttacttgaatgtttgttggctgtttttgaatagtgaacggtaaaactggcgggtgtacttattgcttgctgccacctgcattgatatttcttaaatcgtatgcatctacatactacaggttccaaaatcacattaagtgcttcttgtcgtttcatattatatgtttataagatatcaaactagcaaaacttttgctttgattattttctagctgtatcttataataaagtttaatattatctcttgtgatctaccatccttagcttggccacacactctctgttcccttgtccacaatcgtaaactcaataatttcattttaaataaacgacaacagcttgttcacatataa

SEQ ID NO: 193482 - DNA, 203 bp, Arabidopsis thaliana landsberg
atggtttattacggtttcagaattgccgagatctccaagagcgctgcttgcaatggagtaaagtctgaccttgtgaggctttccattcttgtcaattccatctgcaatcacaccaacagattgtccttctctgtacgggatttctcctatcgaagacacataaatgctacttcaattaccatcaagaaaagaatcattataaa

SEQ ID NO: 193483 - DNA, 728 bp, Arabidopsis thaliana landsberg
atgatgaagcgggcaccagagatttgtgcctccgtcgtcgtcttcatcaaaacacagaaggtatgccacaccgccagcaaggtaataacaatcgtgctcctgatgacccttatgctaagattaaattttctataccatctttttcgggtcattatgatgttgagggatatcttgattgggagatgacgatagaacaaaaatttgttgcccaccttgtacctgaacgacatcaagttagacaagccactagtgaatttaaagatttcgctattgtctagtggactgctctagttgaggatggtagagcacctacgacttggtaagatcttaaagtagttatgcgcgatagatttgttcccccatcttatcatagagaattgcgtaagaaattgatgagtttagagcaaggggataaatctgttcaagattattatgctgagcttcagaagggattgcagcattgtgcgatagtagagggacatgaggatgctctttgccgtttttattcaggtttgtggcgtgacatttaggacattgtggattacaaagaatttaacactgtcaacaagttgttccagtttgctatgcttgtagagaaggaattgcagggacgccaacatcgacctagggctacttttggtgccttgagtcatacaacttcgaccactccagcgtccacgcgacctccctcgacacctgctgcacatgttggtaaccttcccctgcag

SEQ ID NO: 193484 - DNA, 213 bp, Arabidopsis thaliana landsberg
atggccttggacaagcggtacagactggcagaatcgaaagactatgaagtgaaggtctcgtttctgcaacttgcagtcacatccaagtgcagagagtaccatggggaagtgaagaaaacactaaaagaggtaggaaggatgaagtacctgcgtccactcttcactgctcttgcacaatctggtggaacagaagagaagcagctggcaaaacag

SEQ ID NO: 193485 - DNA, 403 bp, Arabidopsis thaliana landsberg
atgaatgattggatgatgttctttagacaagcattttttatgtaagtctcaatccacttcacaaaagtagctgtttaacaaatttattagtagtttgcacttcttgatatatttttcaaataagttaataatcttctgtttaacaaactactaataatatttaccaacttaaattcaacttagcttgggtaaaggctaaattaacttttaaattagaagtcactaattctaaaaacatttgatgtcattgctcatttatatttggtcgtccaattattttatttgatatagtctctctactcgctagtaatttctgcaatgtctcatttttcattataatgtttcatagtttttttttccttttagtgagaaaaagtggacattaacccattttgatgtataa

SEQ ID NO: 193486 - DNA, 376 bp, Arabidopsis thaliana landsberg
attttatattctctttactctcgcccttggtgtttcttattgtagcgaaccaaagtccaaaggaaactcctatatagacgtgtcctttaccacctcgccctacaaatgggacgcatccatcgtcatcgtctttaccacctatcaagacacaagtaccaagaattcaccaaacaggaggcgtaataatctaaactctgatcaagcatcatcctgttctggtcatgctactcactttcttaacatcgctctgaggcactattacgagagaagcttcccgcacttagtacccgagcctcaccggatgaattccctcagctgggtggtgctggggtattgcctcacggctgggctggagtttaacagcatttacgcttag

SEQ ID NO: 193487 - DNA, 374 bp, Arabidopsis thaliana landsberg
ggatggcgaatataatgattccgagcaagagaccgcgagccccaagcttctctgagaagcatccaaagtacgtaggttcttcggattggttgccggcagagaaagacaaggctcaagttcagctcactaacttccttgagctatgtcgtttctgcaagaagaatctacgtcatgacgaggacgttttcatgtacgggtcagttttttgcttcttttcctctctgcttagatatatcattgttagggattctttgtgtgtattgttactatggttttcatttgtgaaaatccttgttgcaaccatctggcagatacttgggggcattctgttcaaaacaatgcagagcaaaacagatggcatgcgacgtctttag

SEQ ID NO: 193488 - DNA, 305 bp, Arabidopsis thaliana landsberg
acaataactctgacccttcttgctatggagcttcatctgcccatcaatggagcccaggaggtatttctttgtaagtttcctcactcaatctctctcctctgatgtatcatatatttacatggccatgtatctattatatacatccatttaacacgtgtatgctactaggtttccgcagctatatgtgtgtgtttagaatattcttggtatcaagatgatatgaagaatttggaatctttcttcttctttttttccttcttttttggtttttgaaagataagttagtgaataagacaacaagatag

SEQ ID NO: 193489 - DNA, 78 bp, Arabidopsis thaliana landsberg
atgcgaaggaaccatcttcccagtagcagatccatgaacgttctcacacaacgcaattgcaggaccgtcgactccatt

SEQ ID NO: 193490 - DNA, 77 bp, Arabidopsis thaliana landsberg
atgcccgcccgtgcgctcgccttgtccccgttacgcacgccacggtgcccccgcctgcacccatcctcgcgatgccc

SEQ ID NO: 193491 - DNA, 381 bp, Arabidopsis thaliana landsberg
atgacccccgagcagctcaatatgcaaagctgggagaaggatatcgaggaaagaaacagaccattgagtgatgaagagcttgatgccatgtttcctaaagatggatacaaggttttggatccgcctgctacgtatgttcccatcagaacccctgcgaggaaacttcaacaaaccccgacacccatggcaactcctggctatgttattcctgaggaaaaccgtgggcaacagtatgatgtgcccccagaagttcctggtggtttgccgtttatgaaaccagaggattatcagtattttggttctctgttaaatgaagagaacgaagaagagctgtctcctgaagagcagaaagaacgcaagataatgaaactgttgttaaag

SEQ ID NO: 193492 - DNA, 271 bp, Arabidopsis thaliana landsberg
aggagccattgccgaaacaattgtagtgtatgtagagtctcgcaacatcattgacggcgtagcgagactagcaattctttgctgcgccaaggagctctctcagagaccagagatgaggtatgttgtctttacacttacctcactctgtgacacttggaagcctagtggtatcgtagacaacgacagggaggactcaagtgtattagaacttgtaaagagatggaaggagcaagagatggagggaagcagcagcggtatcattgtggtttga

SEQ ID NO: 193493 - DNA, 169 bp, Arabidopsis thaliana landsberg
atggcacaaaatggtaagtccatggaacgaatttgtgaatcaaaagaaagtagaaaagtaacggagttatttttgttggcttttttttaccctgccatttacagcaacaacgttgagccgttccagaaaaacacagttggcctacagaagcacctcctcccattattga

SEQ ID NO: 193494 - DNA, 39 bp, Arabidopsis thaliana landsberg
aagctggagattgaggaatctgaagaacaacccgaatga

SEQ ID NO: 193495 - DNA, 176 bp, Arabidopsis thaliana landsberg
ctacaacgtctaaccaagtggttgaaccaagaaagacttcaccgatctccaccgacgtccataaccaggaagaaacggaagagaagcctctcatccaccgagaaagggccaccgctgcaatgtcggagaagatagcttgccttactcctgctttgtcttgcaaattcataacctaa

SEQ ID NO: 193496 - DNA, 93 bp, Arabidopsis thaliana landsberg
cagcgtgcctttgctgcttcgtcaacggatggggctgccttcgagctagctctcttgggtgccatcgcgggtggtttgttcgtagcacgaacg

SEQ ID NO: 193497 - DNA, 76 bp, Arabidopsis thaliana landsberg
atgcactatgacagtaagtgactgttctgataggatatctacttccccagatcgcctgcaagtggccgccgtctag

SEQ ID NO: 193498 - DNA, 288 bp, Arabidopsis thaliana landsberg
atgcatgcaaggcatcgcaaaaggaagaacctggtcactaaaatggtggatggaggccgtatcctaataaaccataacgaaaaagcatcggtggtggatgacttctactccaccctcattggtcagtgtgggagcagcgaaaggacaactgatctagaggcccttggtctgccaaaacatgagctatctgctcttgactctccttttttagagcatgagggaaccatcagtgagctaccttcaaataaggccccatgtccaaatgggttcactggacgcttctataag

SEQ ID NO: 193499 - DNA, 394 bp, Arabidopsis thaliana landsberg
atggtcaaaaacggtgggccttgagggtaagtttgacatttacgttggggattatccggtttggccatttccatgccatttcaaatataaactaataaaagtttactaaagcttattgtattagcaattaaatattactagtgaatagtattttcattactggcgagataagttggtttgaaaatttctttattcgacgtataaattggttttatctatgataaccagcccggttcgatgaacagatgaggcggatattgaagataaccgtgtgtttagtggggaaaatgacgaatttgaccttgaagcgtgtgaggtattacgtcgacaagagaatctttcggtgggattacaaccgggtaaaagatggcacgtggggcctggttactcccac

SEQ ID NO: 193500 - DNA, 416 bp, Arabidopsis thaliana landsberg
aacatttcacagggaacaatactttttactcgactaaagtaagtttcgttagacagggagattcacatgaaatcgtcatcagatgtaataaagaaacagagggtctaaaacagagcaatcattaccctgttctctctgtttgtattgataagaaggcggtgataaaagtgaagaggcttcaatggaatttcagagggaatcaaacgattttcttgaatggattgcttgtggatctgatgtgggatgttcatgattggttctttagtaatcaaggagcttgtggaagagctgtgttcatgtttaggacaaggaatggtttagacagcagcaggctttggttagaagagaagattgttaagaaagatcaacaagacaagcttgacttctctctcttcatttacgcctgtaagacttga

SEQ ID NO: 193501 - DNA, 1219 bp, Arabidopsis thaliana landsberg
atgaattcgagggctgatccgggggatagatattttcgagttcctttggagaatcaaactcaacaagagttcatgggttcttggattccatttacacccaaaaaacctagatcaagtctgatggtagatgagagagtgataaaccaggatctaaatgggtttcctggtggtgaatttgtagacaggggattctgcaacactggtgtggatcataatggggtttttgatcatggtgctcatcagggcgttaccaacttaagtatgatgatcaatagcttagcgggatcacatgcacaagcttggagtaatagtgagagagatcttttgggcaggagtgaggtgacttctcctttagcaccagttatcagaaacaccaccggtaatgtagagccggtcaatggaaattttacttcagatgtgggtatggtaaatggtcctttcacccagagtggcacttctcaagctggctataatgagtttgaattggatgacttgttgaatcctgatcagatgcccttctccttcacaagcatgctgagtggtggggatagcttattcaaggttagtcaatgtgagtgatcaaatctattttcagttttttttttttccctttcttccgttcttgcagtacttagagtagaacatgaattagaatatcttaagaaagtcatggttttgaacagatggacctccagcgtgtaacaagcctctttacaatttgaattcaccaattagaagagaagcagttgggtcagtctgtgaaagttcgtttcaatatgtaccgtcaacgcccagtctgttcagaacaggtgaaaagactggattccttgaacagatagttacaactactggacatgaaatcccagagccgaaatctgacaaaagtatgcagagcattatggactcgtctgctgttaatgcgacggaagctactgaacaaaatgatggcagcagacaagatgttctggagttcgaccttaacaaaactcctcagcagaaaccctccaaaaggaaaaggaagttcatgcccaaggtggtcgtggaaggcaaacctaaaagaaagccacgcaaacctgcagaacttcccaaagtggtcgtggaaggcaaacctaaaaggaagccacgcaaagctgcaactcaggaaaaagtgaaatctaaagaaaccgggagtgccaaaaagaaaaatttgaaagaatcagcaactaaaaagccagccaat

SEQ ID NO: 193502 - DNA, 261 bp, Arabidopsis thaliana landsberg
atgtttcagatggaagaggacgcattaacccaaaaggtctattgttttacaagaatctcatcaaagagcgacgaagccatggtgaggtttttgtcttttactttatcgcaactaaaaccaattcatagcttttgggttctgatagacatattggtaaaccttttaacaggaattgaaccacaggttacactttaccattatgatcttcctcagtctctggaagatgagtatggaggatggatcaaccgcaaaatcatgtaa

SEQ ID NO: 193503 - DNA, 114 bp, Arabidopsis thaliana landsberg
gcaaagtgggagcaccagcagcgaagcaagtatgtcactaaacccgcagatgtttcagcagctcagcataagtcagtgacaacaccaacagatgcagcattccaatcagtgtag

SEQ ID NO: 193504 - DNA, 975 bp, Arabidopsis thaliana landsberg
atgtctttggaaaccggagaaatagtctcttcgaaggttccatgttcagggaaacttggcagtggaaagaaagcagaaggtaagctaagaactaaccagaagttttggtgtgagatttgtaaagttgggacctattgtcaaatagtcatgagggatcatgagttaggtaaaaagcataaggctgctgttacacaacagaatgagacacctgaagctgcttcaacctccttatcccctgcttccgttacagcaccgcaaccagaagccattagagtatgtgaaaatgctaatccgcagggtcaaaaagtagatgaaattgcggcgaaagaaacaacgggaaagaagacaaaaggtgagaagaaaaagaaggaaacggtttggtgcaaaacttgtaatattcagacgaattctgagcagacgatgaggaatcatacgcttgggaaaaaacatatggctttgcttgagaaacagcagaataaactcattacagtcccagtgagatctctgaatgctgatccaggacagaaagaatcagtatctctagcaatggatgatacacaaggtaaggttcattgcttggagaagtcatagaagattctttgtaactttgttagattattttatatcaactttttttaccaaaaaaacctttgttaggtcatgacaatataccatgaggaatcagagattgaattcatgaatttatttttattttttcttatgcaatgtgacagtaggagatttgcatgatgttttttttgttgtgagattgagaatcatgagaataataaccaatgccattagagagaccagaataagtgtatagatcatgattgcattttggagtgtgtgttgtcttatgcttttatcatgtgttttacaaacttacaactgtacaagcagagtatgtttgtttggacatgatacgatgataaatgtcttctttcaggaaagagcccaaaatggtttgcctag

SEQ ID NO: 193505 - DNA, 91 bp, Arabidopsis thaliana landsberg
atgagccagaccaaagtaacagtgagtaaacctgtagcaagtagaatcccagtaccttccacagcccatttagttgcacggttttccatag

SEQ ID NO: 193506 - DNA, 256 bp, Arabidopsis thaliana landsberg
atggatagtcacgatggatgtgggtacgggtcgggtcagagaacttacggcgttgatcggaggaaggaaatcgtgagtggtaagagaaatcagatctacgggactcgggattatcctccgtcactgccgcctccgccgggaaaagtagcggcgggaaggagcaacgcgtcgtcgtctttgcgaatcggaggtttaagcgatgcggagatgaagaggaagaagagaatcgcgaggtataaagcttatacagttgaag

SEQ ID NO: 193507 - DNA, 290 bp, Arabidopsis thaliana landsberg
  unsure (1)..(290): unsure at all n locations
atcttgctcgccttcgacgattgaagataagctttgatatgacgaacggagattcgacgatgaccggagtaacgacgactgtgtcctcgttagcttcgcctgtttttccatttccccgtaccgataaaaaacgaannnnnnnnnnnnnnnnnnnnaggtgagattccggtcataaccaatttctccggcgagagtacactaaccgctgcttcaccaccgtaactagcatcacgcacgacttcgacaaagagagagagagagacagagagagatttgtgatattagtgtaa

SEQ ID NO: 193508 - DNA, 338 bp, Arabidopsis thaliana landsberg
atgagtttagccaatggcctttattcaaaagatcctttgatacagcttgattcagctatcaagatcaacaggattctatcagatggtaaataaaacttcctctgtttcgatctgaaagatttcatcttttaacatttctttaagttttgtgctcttatatctgtccaggaatgcaaagaaacttgcctcttggtacaaaagatctaatacgatctggaattgttgctcgtttcgttttccttcttcacaatgaagaattccctaagcttcaagttagaagaaaaaaaagaacccatccaattgttttttctgatgatcagtgtaatctttgcttgtga

SEQ ID NO: 193509 - DNA, 311 bp, Arabidopsis thaliana landsberg
agcaatgtgatggcgagatagctagaatgttctacacagttggtttgtcttttaacgttgcgagaaatccttactatcgtaactcatttgtacgtgcatcacatattctaggatatgttcctggttataattctctgagcactacccttcttcaaaaagaaagaaaaaacattgacatgcatttgcatcctttgaagaacacaaggaagcaaaatggagttcgtatatgtactgatggttggtcggatccacacggaagaccaatatttaacttgattgctgcaaatgagagtggtcatatgatatgttaa

SEQ ID NO: 193510 - DNA, 80 bp, Arabidopsis thaliana landsberg
atattccatactggggacttcataatcgagttgtcgtgctcacggccatcttcgtcggaataccgtctctcgtattgtag

SEQ ID NO: 193511 - DNA, 320 bp, Arabidopsis thaliana landsberg
  unsure (1)..(320): unsure at all n locations
atggatatcgacccgccgcctcaccagccnccgcccattcctgcgaggccgcgtgcgccaccggccaacaacggtgctcgaaacattcccgtggagccatcacggccggagtggcgtcccggcgacgtgaacggggtgaagagccagacgacggcacaagaagtttcgccgccgcccccgacaagccacaacgtggccggatccgaggacacagacgacttcctccgagccagccttggggacctcaagaacgtggagcccttcgcggccgcccccccctcgggactgggctctttcacggatatgaagtcgaccctgcc

SEQ ID NO: 193512 - DNA, 175 bp, Arabidopsis thaliana landsberg
atgcctcctgctacaagtactggccttatggacgttaatcagttgaccatggatcaagttcagaaaatagttcaacaacttcatgatcgagttaatatttcagagaattcagctcctatttcacaagctgcttccattacagaaaatggagttatggccaatcaatcaacatcgg

SEQ ID NO: 193513 - DNA, 671 bp, Arabidopsis thaliana landsberg
tctcttctccttaacgatcgaattttgaatcctccgatggatgacggtgtaggagtgagagcaggatgcatccggatcagatgtccgtcgccacggagaatcgtgtctcgatggctctccccacaggggaaggtcaaaggaaagaaaacacctatggcggaaccaagggtgagagactctgacacggtgaggatcagaacttactcggaggatgatcatcatagagttggccaattttcagattcaccgccaccaaccatcccttccggtaacaatttttttggtctcgtcgaattgaaaacgatcatggagaactaagattgttttatgtgtgaactgaattgtaatagatcagtttaattaatctaattgtgtcctaattataacttttggtcttgtagaattgcaaagaagggaatttttgttcagcattggcatgagttgttatttgatacatttgattgctactggtagacaagagattcacaagatcgttgagctacgtaacgatttagacaagtttttggaatgtcgaaacgaagagctgaggcaaaaacagcaagagtttgtcgagttacgtaacaacatacagaagtttttagagtttcacaacaatgaattgaggcgaaaacagcaagagaaaactgaaacctctgcgtattccagcccaa

SEQ ID NO: 193514 - DNA, 424 bp, Arabidopsis thaliana landsberg
atgaatgatgaaaccaagataacaggaattgttccgaagaaagaatccgctgcaatggctccaatggcagggaacataaaggtaaaaccactgaaaatgttgagaatcttcgcagctgcgatgctcttcatgttgtactcttcgatcaggtagacaatcaagttctgtaaccatcccaacgtagctaatgttaggccgaacaacgttactgcgacaaagaaactagcttcaatatacatgaactctcttcttcttctgtggctttatatagttatgcaacaatgaaaacataaaaactacattacctatcataaacgggaaggtgatcctgccgccagagcgtctggtgctagaatctgctgacttcagagcttctgcatcgcgggaaactgaaccagacatatttctaaagaacaacaagtga

SEQ ID NO: 193515 - DNA, 48 bp, Arabidopsis thaliana landsberg
atgacagagataaatgagctggacgagaacaagcagaagaagaagaag

SEQ ID NO: 193516 - DNA, 256 bp, Arabidopsis thaliana landsberg
ttttattccgcgaaagaaaaagcagtcaaactccaagttgaatttggagctgagtctacgaagtcacgcataacgctctttctttcacgcgatcgccgtcggcacgtgtttggcggtgagattcacgctcgtacatggaaacgcggttcccaagccgcgcgtcctcaaggtgttgccacgtattttacatttttgcgtcatccaatactgttctttggtttcttcttctctcttcttttcaggcgccgctgcttaa

SEQ ID NO: 193517 - DNA, 117 bp, Arabidopsis thaliana landsberg
agtctgacaatatttgcacataatcagctacgtgaagtccactgccacatttgctttgtgcatgagtgcatcaatgatgtatcgaatcgatacgaaagccaaagccgcagcgattag

SEQ ID NO: 193518 - DNA, 329 bp, Arabidopsis thaliana landsberg
atgcagaagtctttgacagtgcggcagtccgttcggccattctgggtgctcagcagggcaaggtgattgtatcccgaattcaagcatctctcgcaggcagcaggctgtgcgagctacacggtgtggatcgccggtcgacatgtcgcctactacggccgcaagggcgagacgcacattgagcgcttcccgaattgagcgctggcccattgtcattggtgcgtcaagcctcgtgtgccgccatcgccgaaacatcgacacaccccaataattcgattgcaggggcgccaccctatgcaactcacggcgacagacgcgttgagaacgggtag

SEQ ID NO: 193519 - DNA, 567 bp, Arabidopsis thaliana landsberg
atgtctatagtcctggtcattttcattaatcgaagcacggatcgcagcacattctttcctcacaacagcacgttcctcagcagcggttttactcgcacgtatagctcggatcatgtcgctgcaacacaaattgtcattaaaatgatgaattcatttacatttacatatttcaatttataaagaatcgaagcttcatcaaaaatgctaagaggattctatcatacaacatgcctaatctcacacaatcagccaaaacatttttctgataatcgtcaatttccgattgaatttgccgattactagaagaatcaagctacattatggatttagacactagaaaacgcacgaaaatggaagtatcgcaaagtcgcaatagagaaaaagcagattactagttggagatcggagtaaagtgattcctaacctgagacgcgtgccggaagagaatggattcatgaccggagcggtacgaagctgatgaaatcagatcggagacgattgaagcggaaaaatggatcaacgaatttgaaaattcatagatctaagaagctgaatttccagatctga

SEQ ID NO: 193520 - DNA, 27 bp, Arabidopsis thaliana landsberg
atggcttttgttgatgggaggatgtcg

SEQ ID NO: 193521 - DNA, 64 bp, Arabidopsis thaliana landsberg
atggctgtgtatctacagcagaagatactcgagtccagcactgggagggggctagaagaaagag

SEQ ID NO: 193522 - DNA, 764 bp, Arabidopsis thaliana landsberg
atgcagattggttggttatacgattcaatgtcagaagatatgaacactagtatcggaatccactcgagaggttggactagctcatacattgctccggatccacctgcgtttcttggatctatgccgccgggaggactggaggcaatgatccagcaacggcgatgggcaacaggatcgatcgaagttcttttcaacaaacaaagtccgttgctaggattgttttgcagaaaattaagatttcgacagcgagtagcttatctttgcgtttccatttgtgtaaggtcaatccctgagctcatttattgtctcttgcctgcatattgcctactccacaactctgccttatttcccaaggtaactctctctttctctgtcattcatactaaatatcatattgttctatttgtcatcatatatatgaaaaatttagaaggagatttcaattttgatctttgatactttttccttgtggatttagggactttgtcttggcataacaatgttacttgtggggatgcactgtctctacactctatgggaatttatgtgtcttggtcattccatacaatcgtggtatgtctcacagtcattttggagaatagtagccactagtagttggttatttagcatctttgatattatactcaagcttcttggactctcgaaaaacgtgttcttagtatctaaaaagactatgcccgtcgaaaccatgtcaggatctgggattggaccatctcaaagagaagatgatggtccgaactcag

SEQ ID NO: 193523 - DNA, 960 bp, Arabidopsis thaliana landsberg
atgaagacccacgttggtgttgctaatctcagatacaatcaatgggttcttataaccagagaatctaaaaaagatttgaaaagaagaaacgaaaataataagaaaatgagacgagttggtcatgttaatggtcaaaggaggatcagtcgtgggtatatactcttttgttctctcgcctgaattttcttcattatcagagtggcagaaggagagtgtgttctaaaagaaagaagttttctccagccttaggctgtgactattagtttaatcatagtttatctcttaattccctaattatttggtatttaactacattcctggacgccattattatatcgagtttggccatagttgcacgcatgatctatgtcttcctcgcgtctatttgtctcctcccctttatgcatagtggagtggtacaagactttggtagagttcacctacaacattggtttgcatttgaaccgtgatttggccggttcaatttaagcgccggtttacgagttttaacctctggctgattaagtaaccaattttggcgaaatccaaagacgaaggcaaaactctctggctgatcaagaggattcgattaggctctttgaccttgtcaacaaagaccttagaatgaaagcattcaaagagaaacactcaaaacatggtatgctcaaagataacatcccttggatggctataagcgacgtacttgaaacacgggaccacgtgacttgctgccagaaatggtatgagcagttgatatcaccaatggtagcaaagggaatgtgggctaacgttgatgactataggctcttggaagagcttttgaaactggatgctgcttgtatcgacgatgtggattgggataatcttttggagaatcgagatggagaagcttgtagaaaacggtggaaccagatgatcattcatatcggcgtaccgaaatcgaaaacatttgcagaacaa

SEQ ID NO: 193524 - DNA, 411 bp, Arabidopsis thaliana landsberg
atgggtcacttcggccgccgcgcgatccgcgtcgcgtggctgtgtctcgtgttccccgcgctcgtgctctgctacgcgggccagtgcgcggtgctcctcggtcacgccgacgcggactcgcagcccttcttcagcatggtgccgcggggcgcggacacgctcgccctcgtggccctcgcggccccggccaccgtcatcgcctagcaggcgctgatctcgggcgtattctcgctcacgcaccaggccgtgcggctcgggtacttcccgcgcgtgcgggtcgtccagacctcggacgaggccgaggggcagatctacgttcccgccctcaaccgactcttgatgctcggctgcctcctgctggtcctggtctttcgctcctctacgaacctcgcggccgcgttcggactcgcg

SEQ ID NO: 193525 - DNA, 488 bp, Arabidopsis thaliana landsberg
tggctgcagctgcgcctcaaccgccaatcccgtggctgcagcagcaacagcctgagagagcagagaacggtccagggggacttgtgttagggagtatgatgccgtcttgtagtgggagtagcgagagtgtgttcttgtcagagcttgtggagtgttgtagagagttggaggaagggcaccgagcttgggcagaccataagaaagaggctgcatggaggctaagaaggctggagctgcagctagagtcagagaagacgtgtagacaaagggagaagatggaggagattgaggcaaagatgaaagctcttagggaagagcagaagaacgcaatggagaagatcgaaggagagtacagagaacagctcgttggtttaaggcgagacgcagaggccaaagaccagaaactggctgatcaatggacctctaggcatatcagactcaccaagtttcttgaacaacaaatgggttgcagattagaccgcccctga

SEQ ID NO: 193526 - DNA, 465 bp, Arabidopsis thaliana landsberg
atgagatacttaatggagaagatgaagagtaaaagagatgtgattgtatgcagaggattatggtacgcaatgactctactctcgatctttggcctctccatatccctcaaccttctcttgccatctggtgactcgtcatcgatgtctcggttcctaagagacggtgcggtcagtgccacaacattctacgcagtgacgatactcagatatcttttcttcaccgatcctccctccacttgctacacggagtttactacacctaaaaagaggattcctcaggttgtgttctcggagcttgccttgtacctagtgttcataacgccgctagtttgttcactcgtgtttacgaagaacgtgctgtctttgttatacatatcgttattcacatatcgttgtcacggaggatagggcttattcagctacggaaagtgtggatgagcgaacatcttgatacgtttctcggtg

SEQ ID NO: 193527 - DNA, 645 bp, Arabidopsis thaliana landsberg
agctgatgatgtattgatgtttcagtacattgcatattttaagaatgtgaaattctggaatgaagcgtgtgaatggtgtgggagagagtgtagaagaagtaaagcaagagattcaaaggaaatagaagaagtggtggtcacgtgggaaatgggaaggggttcacgtgggaagttgccaacgtggcagaacatggtccccagtgaccacactcgtgcggcgtaatttttgttcctccacgaccagacattcacttctctttaatcattggatacttctctcctcctccgactcgatggttcctaacaattccacgcgctcactctcgcgtaatttttcctgtaaaaatcgctgtgatttttttttttttttttttaaatcgttgagagaatttaaagaagagaacgttagaagatactcgataagatctttagcaaaacaaaaaactcaatatattaatacacgtaaatatgagttaaattgtggatatgagtatatttacaatatggtttgagttttgttataactgtatggcgagggaattaatttaaagatatcagttcggtaagagacagctacgaacaggatccggtgaaaaccgccaaagcaaccaaagcccatgttgtccaacaacgagagtttctgag

SEQ ID NO: 193528 - DNA, 231 bp, Arabidopsis thaliana landsberg
gcgaacaatagcttcgggcgagccaaagatctagtcaagaacaactcggtgaaatatggacggctaagtgtggaggcccattgcttcgatacgcaacgacatctcgctatagaattcaccgacaacctcaagaatatctcgataatgagatcaattgggatctgcaaggagtttttagttccatcctctaagcgcagagacgttttcatggccgaaataaataaaccctaa

SEQ ID NO: 193529 - DNA, 465 bp, Arabidopsis thaliana landsberg
ccctgatgggcaacagtttgaaacctgcaaggaagtctccacatatctacgatcacttcttgaatccccaagcaagaaccaacattattacttgcaatctgacaacaagactctaggacaacaaccagtgatagctaacgaatctttactaggtaactctgattccatggactctgagacaatgcagtaccttgagagtggaagaaccagcagtgaggtgtttgaggaagcaaaagccgtagagaatgcaatgaagcagatcgagtgaaaaccagtctgatgcagaaagatgataatgcagattttctgaatggagttgaggacaacgacgatgatatgaagaaaagagatggtaacatggagaatttggcgactctatcgaattcagaaatgacgaaaagcctaccgacaacgactaatgagcttcaacagtatttcagctcacaaatcaaccgagttcagtga

SEQ ID NO: 193530 - DNA, 167 bp, Arabidopsis thaliana landsberg
attcgatgtccttttgggttggattcgaggtcgacacatggcaggcggatacacatcgctccatgactcattggcggctgttaatcaaagtttcggcgatgtccggcgatgtctggcgacgtccggagagtttgacagcgatgcgccaatcctggacacgtagttag

SEQ ID NO: 193531 - DNA, 236 bp, Arabidopsis thaliana landsberg
aaaacaagaaggcgagaacattcttgttgtagccgtatatgtggatgaccttcttgtcacaggctctaacttagacatcattctcaactttaaaaagggaatggctggaaagttcgagatgagtgacttaggtaaactcacatattatcttggtatagaggttctacaaagtaaagatgggattacgctgaaacaagaaagatatgcaaagaagatcttagaggaagctggaatga

SEQ ID NO: 193532 - DNA, 385 bp, Arabidopsis thaliana landsberg
atggaagcttacttggatctgcttcgggagctcgcagaaaagtttgagaagttcgaactgatcaaagtgtctcgtgcagaaaacttagctgctgatgccttagccgcgttggcttctacacccgaaataactgtcacaaggataatctctgttgaaacaatagctcagcccaatatccgaattgaggaaataaactttgttactcgagccatgcgtaggcaactcgaggtgcaagcaaacaatcccgagctgcaacaacttgacgatgaagacgagattccagaagttgtcccgcttgcagctgacgaagattcacctagtctcgatacctcacgactggggggcagattggagagaaccaatccggaactatatcttcaacgga

SEQ ID NO: 193533 - DNA, 588 bp, Arabidopsis thaliana landsberg
atgttatctatgatttcgacctacgagtacgaacagtcatctttgtacgtaagtttgtcattattgtataattgattttaggaaaaaactttctgtaagatcagttaaaatttagtagatctcatatcatttatcatcattatatatcttcaattgaaagatgaatcaaaattaattaggcaacttggcaaaatatataaagtttattgactttgttaaacttacataatctatatatttttgacaacacatatatcttttggcaaaaacatggtaaatagatgggttggtataacttaataacacttacacgatggtgcaaaaatcacccaataacaaattacccacccaagacttcattccataataagatctcattggattaacttgttcctacatatttatatttttagatgcactctgaaaaatggtctaattcatgtgttatagacgatgtattgtactactatgataatcacatgaattgtataagagcgtatgacccgaaagagaggatttgggaagtggtgaacggtgtggaattaaaactacgtttggacggttcacgatcattcacaacaagttatg

SEQ ID NO: 193534 - DNA, 286 bp, Arabidopsis thaliana landsberg
cgtcagcttcacgctgaacgcgtatgtcgagaccctgatgctgaccgggtcggacaatctgaacggcacgggcagcttccaggacaatattctggtcggcaatggcggcgacaacattctggacggtaatcgcggtaacgacaccctgacgggtggggttggcgcggacaccttcctgttccacgccctgagcggccaggacacgatcacggacttctcggcggcggagggcgacatgatccacgtcagcgcctatcacgcccagtccaccgccatcatcagacag

SEQ ID NO: 193535 - DNA, 3211 bp, Arabidopsis thaliana landsberg
tagtagatgggaaatctatggttgtggttccagatgtggtgcttgaggattcagttccgctatgggatgatttcctagtcggtcgttttccaagctctgccccccatattgccaagatccatgttattgttaacaaaatatggaacttaggtgataaatcaattcggatcgatgtttttgcggttaatgataacacagtcaagttcagaatcaggaatgcatctgctagattaagggctctccgtagaggtatgtggaacatttgtgatctccctatgatcgtctcgaaatggacaccgatcgtagaagatgctcagccggaaattaaatctatgccaatgtgggtggtcataaaaaatgttccctactcaatgttcacatggcctggacttggttttcttgctagtcctgtgggggaaccgcaaagattacatcaagaaacaaagtaagtaacaagcttcgaggaagcaaaaatttttgttgatgtggatttatcaaaaccgctaccaaaaacctattttttcaacattaagggagaagagttctgtgtcgagtttgaatatccatggttgcctccaaggtgtggtgtctgtgggaagtggggtcaccctgaaaatggttgtttggctagcttgggtacaacaaaggtttttacgggtcctctgttttgctcagaacaggtaattgttaaatcaacatcggcccaagtgtttctctaccggttgcagtggcggtgggtaatgaccttgtggagtctgtaccgttggttgattctcaagctttggaggtagtaaagggagatattgcagaagaagttgaggagggagaaatagcttcaaattcaaaccaaaagtcagttcagggggaaaaaatacaagaggaaggggattggttaacagtctctagttcaggggggaaaaagtacatatcaaaagtcaggaaggactttaacctatggtcaagtttgtatcgcttcaccctcacgttatgctattcttagcaatattgaggatgattcagttcttgaggaagtgcaaaacgaagactcggtggggaaggaaacagaagactcagttaagggggttttagaagtagtagtagtggagggaaaagaggaaatggctctcaataaaactcaacaggtgaagtcttgttttgatggagcttcaactcgagtttccatccccagatcatctaagaaggctcataaatttgtctcagtccccaatcaaaaggccacggacgttctcccaagacaagtcagcaagaagaataataaacgctttccttaatgtctggttttttctggaacatacgggggtttaataagcataataaacagaaggttgttcgagaatggattaaaaaaacttctttgcagtttgggtgtgttctagaaacaagagttattgaaagtaaagttccggtaatttttgcgaaggtgtttaaggattggcaaatggtttcaaactatgagttcaatcggttagggagaatatgggttgtgtggagttccagtgttcaattgcaggttatttttaaaagtagtcaaatgatagtgtgtttggtgcgggtggagcattatgatgttgagttcatatgctctttcatctatgcctcaaattttgtggaggagaggaagaagctttggcaggatcttcataatctccaaaattcagtggcttttcgaaataagccatggctcttgtttggtgattttaatgaaactcttaagatggaagagcattcaagctatgcagtatcgcctatggttacgccgggtatgagagactttcagattgtggtgagatattgttctttggaggatatgagaacccatggtccgttgttcacatggggaaataagcgaaatgaaggactgatctgcaaaaaattagatagagtgcttttgaatccagaatacaatagtgcctaccctcattcctattgtatcatggactctggtggttgctcagaccatcttcggggtagatttcatctcagatctgcaattcagaagcctaaaggtccttttaagttcactaatgttattgctgctcacccagagtttatgccaaaagttgaagatttctggaagaatacaacagaactctttccctctacatccactctctttcggttctctaagaaactgaaggaacttaagcccatactcaaggacttaagccgtaataatctatcagacttgacacgtagagctacttacgcctatgaggagctttgtagatgccaaaccaaatctctaactactctaaatcctcatgatattgtggatgaatctttggcttttgaaagatgggaaaaggtggcttgactagaagaagagtttttgcgtcagagatctaaattgcattggctacaagttggagataatatactaaggcattctacaatgtgttaaaggagagacacttgttaaatgccattcatgaggtaatggatccgcaaggtactagacctccaaatcaagatgacattaagattgaggcagtccgtttcttctcagatttactatcctctcaaccaagtgattttacagggatctctgtggacgaactaaagggtatattacagtatcgatattccttgcatgaacaaaatcttctagttgctgagatcactgaagcagaagttatgaaagtttttttctctataccgttgaataaatctcctggtccggatgggtacacagttgagtttttcagagaaacttggtcagttattggtcaagaagtcacaatggcgattaaatctttctttacctatggattcttaccgaaaggtttaaactctacgattttagctcttatccccaagagaacatatgcaaaagagatgaaagactacagacctatttcgtgttgcaatgtcttatataaagccatatctaaattgttagcaaacaggctgaaatgtcttcttccagagtttattgctcccaatcagtctgcatttatcagtgacagattgttgatggagaatcttctgctagcttcagagcttgtaaaagattatcacaaagatggtttgtcaccccgttgtgctatgaagatcgacctttccaaagcttttgactcagttcaatggccgtttttgttgaatacacttgcggctctagacattccggaaaagttcatacattggataaatctttgtatttccactgcttccttctcagttcaagtaaatg

SEQ ID NO: 193536 - DNA, 124 bp, Arabidopsis thaliana landsberg
aattgttggattaacagatgtgactaaaacaatagatgttagagacattggatcagctaggatggttcgaaggcgagaagcagttttagcccaaagagataagaagacaatcacattgatgtag

SEQ ID NO: 193537 - DNA, 358 bp, Arabidopsis thaliana landsberg
atggattcattcgatttgagggaaacagaagaacatgacgtaaattatgttgtttattgtttttgagcgagtgttgttttagattattacttttcttaagacgaaactaggtttgattagccttttttgtctatgaagtgtagattgctacttatagtgttctgcctagtgtctatactggattttggatatcgggcctgagtttatgggtggatatttacaagttgatcttttgcaagacagcaagagcaacgtagtagtaaaaacaatctccttggtttgcttcttagatgatgcggccggcacgaatgcaactatgacaccaaaaaagtggtttccactcattgattacgaatag

SEQ ID NO: 193538 - DNA, 271 bp, Arabidopsis thaliana landsberg
acctccagattgggtcctagcaagagctgtaagcttggaagaagcagacccttcattcccaaaagaacgattaaacccaccggaaagcgtccgaggaggcaatctagacgagaaaccgggtttaacatcaacctcagagatcggactcatcgctctagaagtaggaggaagtaacttgcttctaggagtaagagacgaagcttcagtattgcttgtactcatcacattacttcctccaaaacctcccatacttttcattacagctgcataa

SEQ ID NO: 193539 - DNA, 849 bp, Arabidopsis thaliana landsberg
atgagggttttggaccttcattcacaatgtaaacaaggttagtttttcaaacacaaataaaacaatatatgaagtgttcacatatagcaccagtaccgaagaatgtagagtacctttaaggatataatatgcactataagcttgactgttactcaagtaacacctggctaacaattgcaggttcacctgcataatgaagtagttgatcaccaccagattcacataaccaaaaaaatatatcaagggatgtgaaattcgagtaacggtatcaatctgaattgacattggcatacatcaaacagaaatctcaacctagaaattccaggtttggaataaaatcacaaaatcaactcaaaatcataaacatttcagtcgaattgaattgcatcctctcgattccgacaaaatcgaaatagagtttgatccttaaaacaaagcccagaattgaactccgcataaatcgagaattgtctattcgcaaacaactcaaaaagttacacaacaaaagacagctacgactagaagatcggatcagaccacaagagcaacaaaaactgagaaaacgaaaaaaagtcactccacatcttaaaaatgatgtgatcgaaagagacgaagctaagatttgaaaatcgaaatggagttgaatatagaagaatcgaaatcgagatacctcagatggaaattgggcgagaagacgttcgcaaaggaagatagcattggtgaacataaaatggttaaggtttttctggacacaattcgccagtagattctccatcatctgatgatgatgatgaccaaattgacgagacaatcgatgttgttgtcgtatctgggaagctgtgtgtgtaa

SEQ ID NO: 193540 - DNA, 1169 bp, Arabidopsis thaliana landsberg
  unsure (1)..(1169): unsure at all n locations
atggatttggagatgttgttgatgatgatgagtctagtgttgaccagcgttcagcgaatttggataggattagtgagcaaggccagacggaagttccgacgtgcatagagccattgtcttgttggattgagagttttgtgccgttcaccgtcagatcgnnnnnnnnnnnnnnnnnnnnnnnnnnnnnncttcttcgtagatgatctctctattcgacactcgctttgcgtattggagaaattagggctttcgttttatacactaatgggcttttgaatgggctcggtagttcgttatgtaaccaatgtttcttcctctaaagcttgggctgaaatgctcaaacgaatctatgcaatttcgtacaaaaacaaatattttatagacaaacaaatattttacaaaaacaatttaatggcttaatgccttattatacatttatactcgagtttgtgcaaacataatagtaggatataagaacaatgtcataggcaaaagctaaagtttggtggttggtctaatattttgtcctgaatggacaatgaatttagttgccctacatgtttcttttattgggtcaaatcgaagatgttttgttggtgtgtttcaacaattataactgtattaatcattttatttttaattgtttttaaacacaaatcacttgttactcaaatttgatagtcttgtcgtgtcattagcctttgtgagtaaaggagccagaacgggaagaatggctagaaggtatgagaagaggcaaaggatgaggaatagtggctaagagaaaggattcaagaaggaagagctcgagtaggagatacttgcgctgaagaagagtctttactcatactatgtcgtttatatgatttgaaactactatatcaccctaattgtctttgttcaaataaataaaatctcacttgcacaacaacaaacaaaaaaattacaaagtttcatcaaatcagttttcaaaatttttaaatgcttaactatctaatcaacctcccaatcgtcgccaacacatatattgtatgtgtcatgattagggatatcagcttggtgttgaggcacaaactaaaaatttggcaatggagcagtttggtgagactgctgctgagacacaaatcaacggcctatctagtaaggtagatgagatacaaactgctagtaag

SEQ ID NO: 193541 - DNA, 167 bp, Arabidopsis thaliana landsberg
atgggaactataatgaggattttgagaagactgtaagaagctcaagagattctgatgagaagccttggaaggagatcaatgctttgaatgataagttggagaagttgtatctaattcaacaaaagcaagttcattacatcaccaaggaagagcattatcaaatgtaa

SEQ ID NO: 193542 - DNA, 30 bp, Arabidopsis thaliana landsberg
cgccgccgtcgaccaccatcccggagatga

SEQ ID NO: 193543 - DNA, 237 bp, Arabidopsis thaliana landsberg
atgttgacgctaggagaagatcaaatcggtagaattggggcaagctctagctggtctaggtcgaagaagcttcgggttcatcgctacgagattcctgatctaaacgtagaacctagtttggattgggatggggaagaaacaggggaggccactaaggctctgagcagtacatgtttgaaacctaaggatgcagattattgtttactaaatgttcctcagctcgtatacgagttagag

SEQ ID NO: 193544 - DNA, 87 bp, Arabidopsis thaliana landsberg
atggactggtgggactacctggatcatatctggttcgcctacgagaaggccgaagaactggacgtctgggttcttccggctctccaa

SEQ ID NO: 193545 - DNA, 218 bp, Arabidopsis thaliana landsberg
tgccatcatctgtttcacactatcatccatattatggatcgatgatgtcatattcatctcaaccaccttctgaatttcctgaattttctacacaaatgactcttggaaggatgactggtgttgatgaagacattccaaacaatgaagattcaacttctactcgacaaaaaatccccaaatggacaactaagcaaaatttggtgtttttgagtggatga

SEQ ID NO: 193546 - DNA, 959 bp, Arabidopsis thaliana landsberg
gtcctcgacaagcaacaccgcctatgcgatgagaggcagcggttgggcctcaagaggcaaacgctcgaggcccgaattacccgtattgaaaggaaggtgagggccatatagagtgatcccttccaatgggaatggaggaacttcgactgcatggcgaagatctcgcacatgctctggatgtacctccatgctcgaggtcaagtccttgatcccgtaaatgctccggtccaagtgatcccgtctgacggcgaagaggatgaagacgaggaggaagacagcaacccttggaagtgcgtgaagaatgaacccaaagttgacgttaaaaacgaggcatccacctcgaaccccgaaccggcgatgaaagagcctgttcccgagcgtcttccctaaatgtccctcgataactcaaatattttccttttccctttttttttatttttgtttggacttacttttgggctccagcccatctttatataaggaaactttcctattctccttgatttcacaaatattcgttttggagatattctttgaatgcagggcgattggagtgacgtgaatgcttccgcaaatcactccagccttgaatggaaacgcatccttgaaagttacgagtccttctataaattgcttctctatgttttctttattcttcatctaactttcgtttttccttttgtgcagttatggcttttaaccttcgatgctcggagtccatgccagacttttccagggtcaagatgattgatgaagatatcctgaacgtgccggacagaggacgctctccacttcgtaacttcagatcccagatccgagctccgtgtgcattaatcaaggatctttcaagcagagatcaagaaattgcgatggcctttatcaaagccctcgcggctcaacaccaaaagcgttcatcagaaaagaagatacttagaaagaagatcaacctgatgctctag

SEQ ID NO: 193547 - DNA, 663 bp, Arabidopsis thaliana landsberg
agtcgacgagatttgcaaaaagtacgacaagtacgacatcgacaaacaccgtgagatcggcgcttccggcgacgatgccttctctcgcctcttcacctccattgattccgacatcgaagctgttcttcgtgtttgtccccttctctctcactctctctttttataaaaaactagatcgttcattaaagccaagaaaacgaaaccctagattgttcttgattttctcatttgatcgctatgtgaggaatattttaatatattttgggtttttctgttctggactttgaaatatataaaatctttaatcatttctgttgatgatttttttttatttttttctcgttaagaaagattttgagatataaaaaaaagatttgagaattgatagaatatgaaatattttttgctctttagattttatcgaccgtatcttagaagatatatttagtgttgtaaccaatagaatctaaataatattgcttcattttcagtgactcttaacgttattaagtttaaattttgtattaaactatgtagaaagcggagttggcatcaacggagaagaatagagctgccgcggtggctatgaatgctgaggttcgaaggacaaaagcgcgattagctgaagatgttgttaagcttcagaaactcgctgttaagaag

SEQ ID NO: 193548 - DNA, 791 bp, Arabidopsis thaliana landsberg
gtggaatggaaaccaatgcatgtaagatcacttgacttaaaattttatcaaaaacatcatttaatgttgctaatattatattattaacaatactatatctacaatcttctttggtgaatcagggttcgataccgcagaactttctgaaaacatgcaagatgatgtggcgtcattaaatcatgctgctttatctattgctaaccttttatctgaagaacccccaaacggtaacttatacttttttacactctaaattaatatacatactttagaccttatatatatatatcaaatttataaatctctggtctgaatagtcatgataggaataggaggtatgggctttggtgcagcgcaagctctctaccttgcgagtaagggttgctatgacactaatcaacggcttcaaataaagccacgagttgttttagggcttaaaggatggcttcctggctggaggtagagtcttcaagtcctactgtcactcactttgtactaatgtttagactcacattttaaacatgagaaacctaatacaatcttgtagaagcttacaaaacaatgtagcatctaacccctgggctccaaatcgtcctcaacctcaatcaacaccaatcttacttacacattgtatgtgtatcatctatataacttttctacaatttagataacaatcacgagatcatgctaattttggaattttatgtgtcacagctactgatgtggttccatacgaatttgtacacaaatgtgctcattcccttctcatgactggatccaaatcatgttaa

SEQ ID NO: 193549 - DNA, 151 bp, Arabidopsis thaliana landsberg
atgaagctaaaagagtttgagaaagagagtgagaagaaaacatcattttcatccatcagcacgaatccaagttcaccaatctcaactgcttccacgggtaagcctccattgccaagaaagtcattcataaactctgtttccaagaaactcg

SEQ ID NO: 193550 - DNA, 400 bp, Arabidopsis thaliana landsberg
atggttgcgtggggctccctgatctcaggactttgcaagaatggaaaattcaaagaggctataaaagtttttggggacatgaaagatgatgatgatagcttgaaacctgattctgatattatgacgagcgttacaaacgcatgtgctggattagaggctttcaggtttggccttcaggttcatggcagcatgattaaaactgggctagtgctgaatgtttttgttggcagctcccttattgatctgtattctaagtgtggcttaccagaaatggctctcaaagttttcactagcatgagcacggaaaacatggttgcctggaattcaatgatatcttgctacagccgaaacaaccttccagaactgtcgattgaccttttcaatctgatgctcagtcaag

SEQ ID NO: 193551 - DNA, 81 bp, Arabidopsis thaliana landsberg
ctgcacttattaactggagtgtcatatcctttcttgatttgatagctttcctcctcgttcactatattgcacctgaaattg

SEQ ID NO: 193552 - DNA, 253 bp, Arabidopsis thaliana landsberg
gaaaacacagatatatgctagatccagaaagtgaggttttacgaggagtttgcaggatgatcattaggggtagaggagagactgggaatttcatatttgtagacggtaagaagtaccactaaaaccttgttagccacaaatgctgtgggcagaccaaaagtgtacaaagaaaaagactcggataaatgtgactagaggggcaagtaaaaggatttgtatagcccgtaacggaggttacgcaattcatcgttga

SEQ ID NO: 193553 - DNA, 123 bp, Arabidopsis thaliana landsberg
gagatcgaaccgatcggccaaattaatttaagaattcggaagtcggttcggatcggttctcgatcggccaaattaactagattggagagtcgctgctcgacatcgcagtttggagttgcagtc

SEQ ID NO: 193554 - DNA, 233 bp, Arabidopsis thaliana landsberg
cccatcgcaaggataaggtaacttgtttcttggtgaaatacatcttccaaacctccgtttataccatctggcatgagaggaatcgaagacgtcataatgaagctccaaaatctgctctcattcttattcaatggatcgacaaacaaatgcgcaacagaatcaccaccattcaacgccacaaggaccatcgatatgaggccaccttccaacgatggcttcaaagtcgaagttaa

SEQ ID NO: 193555 - DNA, 446 bp, Arabidopsis thaliana landsberg
atggaacgaccgcccttttatcccggcaaggatgaacggccgtcgcacgccgaggaaaagatgatgcgaggttccccatcctcgctgccaccgctgaatcgcaaccgactcgccgcgcgtggcgttcaggcgcgaatgacagcgcccgtcaacgcatcgcgaatcgtggagggccgggtctgttcgcccaaaggcgcatccagcacgccatccagcgcgtcaccgaaatagtcgaccacggtctgcgccgagcgcgccgagggttcgccatgcggattcgcactggtcgacaccagcgcgccaccaaacgcacgacacagtgcggcggaaggctcatgcgcggtgatccgcagcgcgatgccggcatgtccgccggcaacccaatcaggcacttctgccgtgcgtgggaagatccaggtgtacggcccgggccagatctggcgcac

SEQ ID NO: 193556 - DNA, 48 bp, Arabidopsis thaliana landsberg
gtctttcaggttcttcttggtattgtggtcaaaacaccaatgggataa

SEQ ID NO: 193557 - DNA, 112 bp, Arabidopsis thaliana landsberg
atgaaagttgaggtaccgacagaacataatgataaccgtaatcttgaatgcagtttgccttgcatgagtgattatgatgtacaacagcacaacgatgagcctgactacatgg

SEQ ID NO: 193558 - DNA, 78 bp, Arabidopsis thaliana landsberg
atgaaaattgcaaccatgtactcagggaaaggatattcgaaaaatgcaagcagggactcagggacatggaatctgaag

SEQ ID NO: 193559 - DNA, 228 bp, Arabidopsis thaliana landsberg
atttctaaaacggagtcgtacggtgaatagatggacagataattatgatgaaacgccgatgagatccggaggtggacgacgacacagtcgcaaacgtgaagtgaaagtgtaagtgaaagagacggatgtttttgtttgtgtgttttattttactcttatagcccaattttttatgaccagatcattttctattttccttggccctgtcttaggggcggcccatcataa

SEQ ID NO: 193560 - DNA, 102 bp, Arabidopsis thaliana landsberg
atgggtatatccgctcgtgtcttcgccggtcatgttggtagtcaagaacttgcggccgcgtccatcggaaatagctgcttcaatctcgtctatggacttatg

SEQ ID NO: 193561 - DNA, 85 bp, Arabidopsis thaliana landsberg
atgtcggaacagcaccatcagcatcgttccaacacgaagctcaagcagcaaaacaaacccttcaagtcaaagcaccagtcgaagg

SEQ ID NO: 193562 - DNA, 53 bp, Arabidopsis thaliana landsberg
atgggaacaagaaaggtgatagttggaaaaagtaaggggcaatccacaagtat

SEQ ID NO: 193563 - DNA, 72 bp, Arabidopsis thaliana landsberg
cttgttggtgaaaaaatgccagaattgctggattttgctaatgaccttgttcacttagaagctgctttaaag

SEQ ID NO: 193564 - DNA, 36 bp, Arabidopsis thaliana landsberg
aaaggacgatgtaaaaccggtgccgttggccattag

SEQ ID NO: 193565 - DNA, 609 bp, Arabidopsis thaliana landsberg
atggtggccaataggcattcactgaggatccccataacaccagcaagtggaagattgagagaagagagatcaaagagttacccatttctctctttttcttcttttgtgtggagtggaaagaagaagagtggagtactatataaacgcagagagagagagagagatgatgtgggaattgatggacatgagtatggcatatattataagcttttatgatgaaaattggaaatgaaatgggtcctaactataaggacccactcatggaaatacattatgaaaatgagtggtccactcacctaagactcttaaacggtctaaaaatataaaaacatcactagcattacgttgctcttctgagatacacttacatgctataaatttatggaaaatcttaggttaagatcacattcacacaaaattgaccgatacaaggacaagtggtttcaacaccgattggcatggcctactacaacatatgcgtagatacccctgcgtctcataatctccaaaatccaccaccagctttatctctttctttctttcttttttcttctcagctatcataggaatatattacaagatgaagtgatgttgtgtaaagctattaag

SEQ ID NO: 193566 - DNA, 169 bp, Arabidopsis thaliana landsberg
cacaccacgagctccaccttcaatcacaaaaggcaaaaatctcgaagacgaggaagatagtgaatacgaggaagagccccagtttgctggcatgtcttcaccttatgaagcgctgaagtctgagttcaggcccaatatcggcggcaccaagacgccaaagcttgaacca

SEQ ID NO: 193567 - DNA, 143 bp, Arabidopsis thaliana landsberg
gaggagcgagagcgaaggtacgagtgaggatttacaattgtcgatcgttttcacctagaaaccctaatttcgggggctcgcacgccctctctgatcagaagcgacttcattatcggtcactagaatctgctgcttcttttctg

SEQ ID NO: 193568 - DNA, 121 bp, Arabidopsis thaliana landsberg
ggtctttgttcgaacaagatgaggagaatgaaacatctggcacacccggaacaaagaaaacacaacagaatgtcgagttgttcaaacctgcagctccaccttcaacaccaattccatttag

SEQ ID NO: 193569 - DNA, 913 bp, Arabidopsis thaliana landsberg
atgccctcgccagatgccttcccggggcgggcagcgggtgcgaagtccagccttcgtgttggatttgcatggtcgggatcccgccgcattcgtgcgcgaagcggaagacggtgtggcgaggatcgtggggcgctatgtgccgaactacggagctgggatatccgtggggccaacgatagattgaatcgggtcttcgaattgaaccgtttgccatacggtggttaccccggggaagacgccgccgaccgccgtgggaaaaaaccgatgggtgtgaccgaggaagagccctcgcaggtggctgccccggccgctaagaagagaaaactaggtactgcagtggggggactgggggtctccgatagttttgctatggagttgatggggacgtgcgtagccctcgggggaaggatgtcttcgcccgagctccgggagtcttcggcgcggatgctggatgttaccgggggtcgatggccaaagaatgttccgatcccccgcacggctggcgaagacttttttacgtctcgtatggctcgcgactttaagatttttccttacgggcgggatattcgttgttgttgtatcggcagtgatggagaaggatcgtcaagacgctgctcagaagcgtcgggcggtcgttaggatcggggatcctttccgtgaggcgaagaaggcgcggggagccgcgaagtctgccgccccgggcagtggtaagccattgccggctgtgaagctgccgctcccgggcctagcaaggcttcggctggtgcgaaggctgctacttctggcgtgggcaagccaccctcaggcgggcccgcgaagggacgaaggcttccttcgccggcgcgaacggacggcgcggcagcgcgtgttgtcgacttcgacacggacatctgtgttggggattattttcttg

SEQ ID NO: 193570 - DNA, 171 bp, Arabidopsis thaliana landsberg
atgtatgaaaactcaatggggattgctgaagaaatgtctacggagctcatatctagctctctaaggttcatgaagttcagtgcaagtagatggagaaataatggtttttcaatggacaaagaacttggagaatacggaaaagaagaagaaagatcaagagacaccaaattg

SEQ ID NO: 193571 - DNA, 48 bp, Arabidopsis thaliana landsberg
atgcgtggttctgagaagggtgcacatactgtgttaagggcagaagcg

SEQ ID NO: 193572 - DNA, 495 bp, Arabidopsis thaliana landsberg
atgaaatttcatctgcagacgtgtatggatatgctggagagatctagaaagaaagcgatagataggattctagaaattgatcagactatggagaaaccaaagttggaggatattgagcgtattagcaactgcaagtattgcaataagaatagtgatggccccccgtgtattcattgcgagctagatgaactattccaggtttgctcttttttgcttctgcacttatatgaacttaaatcgatattaatattagctgtcacatcatcatgtatcaaaaaatcattccaggaatatgaggctaggcttttccgtcttaacaaatctcgcaggggagtaatggaaattgcggctgctgaagagacggtacatttgcagaagaagagagatgctcgtaatctttttttatttggtttatcatcaagaagcaaggatctaaatgcatcacgtggtgatgacgaggagccaaccaaaagaaatgctggtgacattgtggtt

SEQ ID NO: 193573 - DNA, 212 bp, Arabidopsis thaliana landsberg
gtgattcactgagacaacagataacaaaaagtaaccacattttagatgataaagacacaaaatcactttcaggccaaggaattgagcaacaacaagtaaaatacctaaacttatcagcaagagcttcaagaatatgtcgacctggcattgctgtattatgctgtagcaaaattgcttccatctccgttaccttcataacaattgaagattag

SEQ ID NO: 193574 - DNA, 120 bp, Arabidopsis thaliana landsberg
atggctgggcgctgcggcgtcgagcagatccctgcgcgctcacgcccttggagtagggggctggacaaccatgggagagagggcagagctgctgcgttccagggatccaagcgccagggg

SEQ ID NO: 193575 - DNA, 330 bp, Arabidopsis thaliana landsberg
ccgaagaagtcagcgggccatgccaagccgctgctgaagctgccgccgttgcaggcactgacgcgcgacttcgcctttgtcgtggcgcgcgacgccgccgccgacacgctgaccaaggcgatccgcaaggtcgaccgcgcgctgattgctgacgcgcagcttttcgacgtctatgcgggcgataagatcgccggcgataaaaagtcgctggccgtcaccgtcacgctgcaaccgcaaggcaccaccgccctgacggacgcagagatcgaagccttgtcgcaaaagatcgtcgccgccgccgaaaaggctggggcaacgctgcggacgtaa

SEQ ID NO: 193576 - DNA, 227 bp, Arabidopsis thaliana landsberg
atgaagttgaagatgtcatcaatctccatgaatcataagaatgtgcttctcatcaagctcatctccgctattctgatatcttttttagcgttccgccttttcattctccactccagcgagtattcttcaatctatgaatgggataccggaaaagaaaaagcatcttttctgccgccggagattatcgtaccggagaatgaagatctgcttcctcgaggtcagagcag

SEQ ID NO: 193577 - DNA, 149 bp, Arabidopsis thaliana landsberg
atgggtctagctatcgtgacagaatctcagatgactacgtctaagaagagaaaggaaattttacgtcttagaggttttaaactagatgttataaatacccgttggaagaagattaaatctttggaaatatgtaacatagcattagtctc

SEQ ID NO: 193578 - DNA, 79 bp, Arabidopsis thaliana landsberg
caaatagcccagcctacaacatcagttcagcatggtcgttatgattctgatgttgctgtcctctacaaggagttcctcg

SEQ ID NO: 193579 - DNA, 216 bp, Arabidopsis thaliana landsberg
atgtggggtccgcacggtcgcgaggtggtcagggagcgggccgagacggcgagggctcaggtaacgtttggcgtttgtttggcgtttgctggatgtgggctatgtgtgggtttgctgaatttgtgtgttgtgtcttaggcggcgcgtggcgagagggtggatgacttcggggcgttgaacagcgcgctgcctgacccggagccgatcccgtcgtag

SEQ ID NO: 193580 - DNA, 233 bp, Arabidopsis thaliana landsberg
atgcatttagtctttcacgacaatccaccaaatagaagagatcgaagatcagctggaagaaaagttagttttaacaaaaaactgcttactagatttgaacataataccaatatgattaatgtgtctcaaaagtatacagcgaatggccataaatgtgagaaggatccaaatgacataatttttacgagaacaaagaccagcaaatccaagaatgtgtggcatttggatgggag

SEQ ID NO: 193581 - DNA, 454 bp, Arabidopsis thaliana landsberg
atgaatgtcatttacaacgatcgaaatcgtttatgtagacgtaaaaaagttaattactatgcatacataatgacaatgaattctacataatttgcgtaacatttattatatatatatatgtgcatatatttttgacgttgcgagaagtcacatttattaaattttgtaaaataaataatttaatttcagtttcccttatcaaatactgttctcgtatttaataaagtttaaataactttttacaaactgttcacatctggtgaatatagtgtcttctccaaccgaatggacgactttctcagggtatttggaggaattacggaacaataagaaagaattcacaagttcttcttcatctttaatttttggtagtgcacatattacagcggattctttgacaagaaaaatccgtaccgaaccgcatgatattacctatgtaaacaacattccttag

SEQ ID NO: 193582 - DNA, 2229 bp, Arabidopsis thaliana landsberg
  unsure (1)..(2229): unsure at all n locations
atgtcacgacgactctcttatgccgacaaagggaatgcggtggcctcggagagtagtgggcccagagttttgagagtcagagctccggacaacgataactcaactcttatactttggcacaagctcactctcatcggcagggtcacaaatccgacagttcaacgcgcctgggcgtttatttcgttcttcacggagcactggaaaacttcttcccgaccattgggaacttacctcagacacgggttcttccaatttttgtttgctgcagaagaggatcttcaattggttctagacggcagaccctatcatacaacaggtttcatgctcattttgcaaggatgggtgccgacgatttccaggtcatttccgtcggaaattctgttttggatccaagttacccggattccagttcacctctggacggagaagcttattcgatgtattggggaagatattggttgtgtggctgagttggaggttttgggaacaatgaccagaatgcgggtccacgttaatggcctccaacctcttgttaagacctccannnnnnnnnnnnnnnnnnnnnnnnnnnnnnnnnnnnnnnnnnnctatcaaagattgaagaggcattgtaagttatgttacagattggaccacaaagacaaagactgcccatcgtcaacctcaaggcggaactctgcggtacctcctccaccaccgcgtgtacgagatagttgacctataaggagtacttcctcctccactcagcgtaataaacactccaatcggccagccagagacaatagatctacccaagtacctcaaagatcttcatcccatggttcacatggtcctgtagcctctataaggagcgtaggtatggatcctcccgcgaagatgataagcaaagatttagatactactctagtagctctcgtttactcccaagaagtgaggagtactcacttcatgaaaatacttcggattatccaaaggaaagggcaccatcttggaggtttaccagagatgatgaagaacgagtatctgaatctagttagccttcctctaatcgatcacatcagtcgatttgtaaaggttctgtggacctcagagatagctcgcgtccggtgctagaagagaatagaggcctcagttcttgtaagagacgagactcagtggttattccacaagaggcgctggcagttgcctttgaataggttagagattttatgtttcagtagacaaactgtgtggatcctacagagagtgcggcaagaaaggaaaggcttaaaaaggcagaacttcaaggtcagattgaggaaactgctgaacaggtggtgagagcaaaccttactcttccctcacctgcagcttttggatctaattctctagagctagctgataactttgagagaattccagtttcgcagaggcttggaccacctaatattttgatccctgcctaaaggccgaagaaaaagaccgccacgaaaaggaaacctgacaggcctcctggaagacctccaaagaaagctcaagggaagaagaagcaagttcagattccttcactttatattgggggtaaacaaaagaagcgccagttattgcagtcaaaggggcaacctaccccgagaagaagattaattctggaagccaaccaagttcaggaaccaattgaaattggggaaccgtctagtgctagaggggctctgcctaacctgcttctcccttttagttggacgcaacggttggttctaactctacagctgaccaaaggtcaaggcacacttcagctggtttgatggatttcttgaatccatccaacacccttccgtaaaagtagcgtgttggaactgtcaagggttggggaaccccaagactgttcacaggttaaggcaaattcatcgtaaaatcttgcctggtgtgttgtttctcatggaaacaaaaaactcagaaagtgtggtgttgaatgttgttcaagagctcaactttgtacatagtgctttggtccctccacatggtcatggtggacgaggtttgactttgttttggaatcaagatttggaggtggaggttctttcccgctgtgataattttattgataccaaattctttttcgcaactgagcagagtaaaacaaagattgtttgggatatttttaaagatttagctccacaaaaggaccttggtttctgtccggggactttaatgatattgtcggtaactctaaaaagaaaggcggtcctctga

SEQ ID NO: 193583 - DNA, 231 bp, Arabidopsis thaliana landsberg
tctctggttctgtacggagacgacaaaggtactgttttttttttgtttttttttgttactttatttggtctttctctgtttgtgggttttctccggctcggaatttgtaaaaaggagaaagctttatcgatttaaaaggtgattaactgattttgctttgttgggtttgtctcttttgtagactctctgttccgtggagttgaagaaattgaacggaatggaggaaattaa

SEQ ID NO: 193584 - DNA, 612 bp, Arabidopsis thaliana landsberg
gcgttgcgtgccttgacctatcgcacggtcgagctgtacgtcgccaaccaggatgatctgcaggtggtgaagctggcttcgatggccaagctcaaggttggccggctggcacgcgaagtcagcgacagctgcctgcaatactggggcggcatgggtttcatgtgggaaaacccggtggcgcgtgcgtatcgcgacttccgtctgacctcgatcggcggtggcgccgacgaggtgatgctgggcatcatcagcaagctgatgggcacgtttcccgcgggcaagaagtgaaggctgacggagagcacagatggccgccatcgaatcgttgatcgacagcaccgcggcgcattccagcgcaatcgcgcggacatgctcgcctgcctgtccgaagtacgtgccgtcgagcaaaaagtgcgcgatacggaaattgcccagacgcagaaatttcgcaagcgtggccagttgctgccgcgtgagcgggtcaacctgatgctggatcgcggctcgccgttcctggaaattgcatcgcttgccggctcccgcatgcatgacgacaaggatggctctcttgccggtggcaacaccatcgccggcatcggctacgtcagtggc

SEQ ID NO: 193585 - DNA, 198 bp, Arabidopsis thaliana landsberg
atagtgctcaagccgtaaactctcatcggacccaatactcacagcgcttagctggtcccccgatgcagtgcttccagttgctcctggaactttccgtctatgatgcgaccgacaccaaagtcggcaaaatgtacctctaccccaagcccgtagacttccgacactgcggtgacggtttgctcgtatacccagccagaa

SEQ ID NO: 193586 - DNA, 498 bp, Arabidopsis thaliana landsberg
atggcggcgtctcccggtaatcactcgacgcttccggatgaggatgagcttgtcgacctggcccgcaaaaccggcgtacccgaaaacgaagacttcgcccattttgacgacgcctccaaggaaggcaagtacctcaaagagcgcggcgaaaaactgtacagcgaaattctggagcagttcgcgctgaaagaagaaaatcaggcgcgttttcgtaaaatgtcccaggaactcggcgaaattcccagttctttggaaatcaattttaagatggccaattatccccacactcagtggatgctgggacagttgacctccaagctgagtcggatcgccaacacgcctctggatgagaaaaaactcaaggacaaacaaaaaccgctcaacgagcacgaaaagacctttaagctggccggcgaaatgatcgtttcgatggcaccggacgtgggcaccagcacgaacctgaacccgtcgatggatggcaaaatctttggccatcac

SEQ ID NO: 193587 - DNA, 544 bp, Arabidopsis thaliana landsberg
gtggaagctcagtgagcggagtcgatataagcagagacatagtaaatgttacaaaagaagtccatatatcttcaagatcaactaaaccggaaacatacgaaaaactttccggttacgacaacttatggcttcactctaatgtaagaatcaaaatcatcatcaaccttatttatttggtcaaatcaaatccagaagattacttcttatcgacatgcattgcagattgaaactgtccgagaagatgattcggtggtatttaagaacggaaagacggtttacgctgatactattatgcactgcaccgggtgattgttcaatgctgcatataacttactaaacattggaacaaaatattacgcatatgaatgtctatttgaaacattttaatgagactttttgtatgagtaggtacaaatattacttcccatttctcgacacgaaaggcgaagtgaccgttgaggataaccgtgttggaccattatataagcatgttttcccaccagctctttctcccggactttcattcatcggattaccatggcag

SEQ ID NO: 193588 - DNA, 165 bp, Arabidopsis thaliana landsberg
agagttctcaggttctgcaatggccgaaaggtcttgtttaataacatgactaatgatgaaggcgtcaaggctgaacaagtcaatcaggttatggcccatgttgcagcaattagcaagaaaaatgatgaaaaaccatatactgaagatatgtatcgtaatataaag

SEQ ID NO: 193589 - DNA, 375 bp, Arabidopsis thaliana landsberg
ctacgcccgatttttttggccgcgctatttctccgccctttctgatgatcttttccaacgggaaaggcaaaaacctacccatccactcaatgtggcgttaaactacgggtacggtttcctctaccatgccatagagtggcagtgcctggcctccggtcttgaccctggcattggcattattcataaattaagaaaaaatcggccaagtctggcttgtgatttaatcgagccgcttcgttgttttgtcgagattgaagtggttcgccacatccaggacatgaaagagccgaaacggatggcggtgcattctgccgaaatgtttgaagagcaataccattatcgtaatggctcgtttcgcgtccgctccattatcag

SEQ ID NO: 193590 - DNA, 7 bp, Arabidopsis thaliana landsberg
atgcaat

SEQ ID NO: 193591 - DNA, 156 bp, Arabidopsis thaliana landsberg
gatggatgacggacaatcttagtgcataccggcaaccacagcttaaccctgtcacagatagtggtgcagcacatgacattcactattcctttaactggggcgagaaggagccttctcgttcagcacaccacatctctgtgcatccacttcggtcat

SEQ ID NO: 193592 - DNA, 218 bp, Arabidopsis thaliana landsberg
atgacggcgaagaaactgatgaaatttaccggaaccacagcaaaagaaaacaaaacctggtaagacctaagagaatcggagaatccaagtaatcagatttcaaggaaaccacgacaaggcagaaatttcagaaaccggaatcacaaaagaaacgaacaatggttatggaagattcggattgcgaacctgaaagaagaaacttaaaaagaggaatctga

SEQ ID NO: 193593 - DNA, 177 bp, Arabidopsis thaliana landsberg
ggtgtggtcgtgactatcgaccttaccatgaatcgtcaggtcgacacttccaaaaaagccgacgtgattgtccatacgtatgaactcgaggacaagttcgagctggctgcacgggacatcaaagatgcgttcaaatgggcgaatactccatcagtcagaaaggagtcacccccatat

SEQ ID NO: 193594 - DNA, 74 bp, Arabidopsis thaliana landsberg
aacataaattcctgcaaagatgcgaggcaaagaggatccttagcatcattggtgctcaattaatcgaaggataa

SEQ ID NO: 193595 - DNA, 305 bp, Arabidopsis thaliana landsberg
ggctgatgttgccggtacaatatctggccatggagtagcaggcacacttgatggacttgtgtatatgtgggacttatccactggcaccaaactcggctctctccatgatttcaaaggtatacactgattgaagttttaactagatatatccatgaaaataacgaagtcaattctcaaaagttaatattgttacatggattttgtcaggtcaaagagtttcatgcatcagtactgatgattccagaaatatatgcatcgcaagtgaagatggtcagctcctagtttattgccatccggaaaagtaa

SEQ ID NO: 193596 - DNA, 348 bp, Arabidopsis thaliana landsberg
ctcgagcgcccggtcaactggcaggtcgtctcgatcgaccgcgaggccgacgactggtccgacgcccacatcctctacctcgcctcccacgccggcctcaagctctccgaccgcgacgtcgcgaagatccgcgcgttcgtcgacagcggcggcatgctcttcacccaggccgacacgaacgccgaatcgttcaacgtctacgtccgcgagctcgcgaaacgcctgttccccgaattcgagctcaaggccctcccgcaggacgacgaactctacaccctccagtacatcctccccaaggccaaccgccctcggctgctcgcggtcaacaaccgctcgcgcctcctctgg

SEQ ID NO: 193597 - DNA, 397 bp, Arabidopsis thaliana landsberg
atggtcttccggatcgtacgcggacagcctcaaggtatcttttcccgggctataatgggtgaaagcctctaatgaatgtggtacttcttcagcttccatcatcatctccaataactgcctgccggtgatatttatacccaacgcttttacgccaaatggcgatggcatgaatgatgtttttcgcattctcaatgttcacggacagaagctggtctcgttcgacatctataaccggtggggaaaccgcgtattccataccaccgacatcagccgcggctggaatgggaggtataataatcgggattcggacctagggacttatatctatatgataaagcttattgatctggataaccatcccaagatgtataaaggcacggtccttttaatccgatga

SEQ ID NO: 193598 - DNA, 253 bp, Arabidopsis thaliana landsberg
aatttggaacgtcggcggtttggaacgacgacggtttggaacagcaccggtcacggcggaatttcaacggcggctaaacgaacgattatgcgaaatcgaacacgacccacacaatcggcgatggttaagatgcagaaaggagataacaagtgatgtcaccggtgacggtgaactgaacggagagagaagagaaagtcgacggttttggatttttgaagttcgccggaatcgaaacgagagagttgaagagtag

SEQ ID NO: 193599 - DNA, 794 bp, Arabidopsis thaliana landsberg
  unsure (1)..(794): unsure at all n locations
caatttgggccttagagtgcgaccctctgctgaagaagtcagtactttggttgcttcgctcggggagattcctaatgatgaacggcaggtttattttgaagtgcctctgaaccctagtgatgccgacataaatgatatgcttgatctgttagctgaggattcatttgatgctgctcttgatggtacgttggcagtggtgcccttccagaggttgatacaactttggatgtccaaaacctgacagtactcgcccgagggccctagccggatcagtcacccgagccttctgctaatgaacaaaagaagaagagaagacgcctgcggcnnnnnnnnnnnnnnnnnnnggacattggtacctcggttcctgctgctgaagaagtgtctgtgactgaatttactgacgctgaccccaatgggtgtacccagtctgttgctgatcccaatgtgagtgttccatctgttgctgatcccaatgggggtgctgcctgtgttgctaatgtggacgacgaggaggaagaagatgaagttcctttgactcggaaaaacagtcggcagttcatcgctagcggtgaaagtagtggggttcctctcctactttgtctgctctcattggtctgcaagaactgtccctggccaactttgatcagactcttgaggatatggttccagaggatttgttatcggagccagtggatgatggcgtgatggatgtttgtgttgatgtgctcgatgcggggttgggtcatcccgggcagcgtcccgcgcctcatcgaccttggagcacggtcttgagg

SEQ ID NO: 193600 - DNA, 261 bp, Arabidopsis thaliana landsberg
atgcacagagagtggaagaggctggtggaccagtggatgaacaccccagaggaaatggctggtaaatagctctctcctcctgttccgtagtcagtgcgagcaggttttggtctagatttatagtaattgggtcttgcaggcactgaagggacgccagagtctctaaacctttcagtgattgaagaagaagaagcctttccttctcctccacatgatttagatatctatgcacctgaacctaatgggtttgaactttctcag

SEQ ID NO: 193601 - DNA, 658 bp, Arabidopsis thaliana landsberg
ggcttcccggtttccagcaaaacaaaatgttcccagggatgactctgtacggctcccatcttcaagtagtcagtttaaaaacacaaatatgcgtgaactaccagtggaaatctttgactctaagtcagcagctgaaaatgccccaggccttactcttgcctcagaagctacaggacaacccaacatgagtgatttgctagaagctgtcatgaagagtggaatcctttctaataattcaacatgtggtgcgatcaaggaggatagtcatgatgaggtcaacccgggggcactaaccctgccagcagcctctaagcctaagactttgccaatttcattggctagtgacaatttattagctcgtttaaaagttgaacaatcctccgcaccacttgtctcatgtgcagcgtctcttactggcatcacctcagtacaaacgtcaaaagagaaaagtaaggcctcagatcctctttcatgcctcttaagctctttagtttcgaagggcttgatatctgcttcgaagacagagctgccatcggctccttccataacgcaggaacacagtcctgatcattccaccaatagctctatgtctgtatctgtggttccagcagatgctcagccatctgttttggtgaaggggccatctactgcccctaag

SEQ ID NO: 193602 - DNA, 117 bp, Arabidopsis thaliana landsberg
cggatgctcaagaaagaaaaagttcctactggaattgctctttcgcttgggcccctagaactctggagtgatgaatttgaagggaagggagactttggcccgtaccgatcaaagctt

SEQ ID NO: 193603 - DNA, 318 bp, Arabidopsis thaliana landsberg
aaagtcagctgacaaagatgatgaagagagtgaaaaggaaggattcttcaagaggctcttgagggacagcaaaggtgagggtgatgaaccaatacctaactcagagggtttctttaagcgccttttgaaagacaataaatcagaagatgaggacataacaaacagttccgaggggttcttcaagaggctcttgagtagtaaaggagaaagcgaggaattgacatcgagttcagatgggctggttaaaaggctgttacgagataataagggagatgaagaggcattgggtgcacattcagacagtttcttcaagagatc

SEQ ID NO: 193604 - DNA, 389 bp, Arabidopsis thaliana landsberg
atgagagctttgctttgttttggactgttggcagtcctcgtcgtgcaatcatcaaaccatactgtcaaccagttggggttctatcagttcgcgccctgcttagctgcagaacttatgaaatatcatgaaaatagcagacagcttgtacccaaatggtacatgcactggcaatgctgcacctcgcctggagcatggacgctgttactttcaagacagggtggattctgtcatgattaacagggacacggcagccctaggtgctagtgcattgcaaagcgtgtgtgcatatcgtgatggcttgcaagtgcccatccaatacaaagttgcacaaccatacctcactgacaaagttgacaaaggcaaacagctactcttccagctacgtgcaa

SEQ ID NO: 193605 - DNA, 295 bp, Arabidopsis thaliana landsberg
atgggtgaggtggcttatatggacgaaggagacctagaagcaatagtcagaggctactccggctccggagacgcgttttccggcgaaagttccggtacgttttcaccttcgttttgcctaccgatggagacgtctagtttctacgaaccggagatggagacaagtggcttagatgagctcggtgaactttacaaacccttttaccctttctccacacaaacgatcctcacaagctcggtctctctccctgaagattcaaaacctttccgagatgacaagaaacaacgatcacatg

SEQ ID NO: 193606 - DNA, 43 bp, Arabidopsis thaliana landsberg
atgccaactggcaagtccgttaaaaacatgaccgtgtcagcct

SEQ ID NO: 193607 - DNA, 196 bp, Arabidopsis thaliana landsberg
ggttttgtttgcttgtcgtgacatgaatcagcaaaacccagaagaagaagtttctttgggtaataatagcggtggtggaggaatcatcgaagctccagctatagtggaggagaaagaggaagaaggattacagcagaagcaggatgagacttttgggtctaccgatccgattcttgccgtcgttgaggagaaactg

SEQ ID NO: 193608 - DNA, 102 bp, Arabidopsis thaliana landsberg
aaagaaatacaaagtcgtataaaaaaaagagagagcgaaacaggaggaagcagcaacacggaaaaggtggaggagaaaaagagagtacttgttgtggtataa

SEQ ID NO: 193609 - DNA, 143 bp, Arabidopsis thaliana landsberg
aaacaggtaaaaatgagaatacctgtgatgaactgaaagcagcacaacgacgccggaccaaagacaccagtgaatggaagatgaagatgagctgtgataacagcggaacaaagacttggaataagagattgattaatagatag

SEQ ID NO: 193610 - DNA, 554 bp, Arabidopsis thaliana landsberg
gtgcacacgtctatggtgggcgggcgtccgttttgtctgacttgggtcggtttgaggaggcgctctctgaccaagattgcgcaatttcgttcgccgagcgaaacgatgctgtgcctctttgcgcgaaggcagatattttgagaagttgtgggaaatttcaagatgcccttcatgttttggatgtgcctgatagcaatatcctaacgaggcttcagctggatactacgcgagcacgtgttcatcgcgatgcagggaatctaacaggtgccgagcgaattcttcgggacctccagctaatttatacttcggacgtaggcgtttatattgctataggtgaactgcacaggcggcgcggagatttatcttccgccttggatatttttttagatatcgagaagaagttttcctattccaaggcttcacgaaatagtatggcggctactttggcggcgcttggaaattacgatggtgcgatagcatatcttccggcgagatttgctgctacccggggagattgggtggggcaacatatccgagcaatgattgaaaattaa

SEQ ID NO: 193611 - DNA, 177 bp, Arabidopsis thaliana landsberg
atggcggtggccatgatgctcgttgcgctggttgtcgttgcaagcggaggcgcgaagatgaggcagaagctgcctgctggcagtggcaatgatgatgaccacttagtcgttcttagccacctatccaacatcattgatgtgccgaggagctggcctacgcatgctgatgctgtagtg

SEQ ID NO: 193612 - DNA, 282 bp, Arabidopsis thaliana landsberg
atggcgctcatcgcggcgctcggctccctcgccgcgctcacgttgcgccgccgcggccagtacctctcgttcgtgcgcgtcctctcggccggcctcgccatcgcgctcgtcgcgcaggcgggcctagtcatcgcgggccttatcacgacgtcggtctcgccggcctcgagcatcgtcggctccctgaccgacctcgccatgctcgcgggcctcggcctcgtgctcgccctcctcgccgtccgcttaataaccctggggaagcgcacgcgcatcgccctctat

SEQ ID NO: 193613 - DNA, 909 bp, Arabidopsis thaliana landsberg
atggacaaatgggtagctgaatttttcctccgacgccaacaaaatcctagggtttacgcttctccactgttatcggctctgaaaccagtagattccgacgactgtgtaaaactcaagttaactgctgttttgcgagatatctccagttccctgattcaaggtaccgtagacgaaggaatgcttgatctcctcgaaattcttgagaagcttctgttacaagaacattcggttatcatggggtctctcaaatctgcgtattgctggactgctgtggaatgtacgcttaggtttatgtggccagtgaatgcttcggatggcttcttcggcgatgcccttgagaggatttggaggaatcggattgggatgttgaaggagaaagagagcgacttggtgactcgtgagttgttgaaatgggagagtgagctaaacaaggcgtttgaggaacctgagatttatcaggagattcgtgagactaacatcaggtacaatgccatctctcatcttaatcagcttctcaaagagcagtgggcactacttggatgttcttctcttgaatcagaagctcgaaagaggtttcttaagcgtaaggattcaccatatgcttcccggagaagaggtaatagagagaaagctaatgatgttgaagaagtgggtggtgtggagaatcctgatggggttgataaggtgagtgcacaagatcaggaacatgagccaactcttgataagggagacgaaatggctgctcgagagctgaaggaatatttagtagagattcaaggacacatcgacccttccactaggcaaggggaagaacctaacagtgcaattgatcactcagtagatgtcactcctccgcctactcgggtgaataggactggaacaggctgtcaagaccataacgaagcatcg

SEQ ID NO: 193614 - DNA, 428 bp, Arabidopsis thaliana landsberg
gtactgaccgtggcaatagggtaaatgctatgcgggcagcaatctgtgaatcattccctgaaccaaatcgtcgcctattgcaaaggtagtctcttttttgtttcctcgttttacggaagttatttaaatgcataggaagtaaataactttctgtcattaattctgtttattttctctcttgcagaatcctgatgatgatgcaaactgtagcctctaacaaaactgtgaaccggatgaacacaaacgccgttgcagcttgtatggcacctttacttcttcgaccccttctggctggtgactgtgaaattgaaaatgattttgatgtcggcggtgatggttctatgcaacttctgcaagcagctgctgcagcgaaccatgctcaggctatagtgataacattattagaagaatatgaaagtatatttgga

SEQ ID NO: 193615 - DNA, 115 bp, Arabidopsis thaliana landsberg
atgatgctttacagcaacaatagttggagatcgaattccattttaatacttctacttggtctctccattgtggccgccgcagactccgccggcaaaacttcaccggtcgaagacg

SEQ ID NO: 193616 - DNA, 362 bp, Arabidopsis thaliana landsberg
atgaggctacgatccgggtacaggcaacatgaaaaaggaacaccaatgggactgttcagcaaaggcaaaagcgaccccgaccggctcgagcgcctggacaccagggcggagaacgccttcctccggggccgccatgacaagggcatgcgcctgaccgcccagaacgagcggatacgcattggcctcgaaaaccgcaccggacggtcgtggacgtcatggggacgccccgtagacgactagccagctccccgcacgaaggcccgcactgccgtccgcagcgcgggccttccgctttccctgaatgcccctaaattagacgtcgaaacgtctagacgtctgaacgtcatggagttacgattcag

SEQ ID NO: 193617 - DNA, 357 bp, Arabidopsis thaliana landsberg
cctcggagacctttgggggtttggcaaatgtcattgatcaatgcgttgaaagttacaacattaggattgatttgcttttcaatcatatcacgcaacaattggtcggcatcactccatctaccagagtgacaaaaagagtctatcatacaattgtaagtgagaacattgggaaaaatacctttctcatgcatttcagtgaaaaggttttgagcattgatgtggttcccgtccttgcaaaggcgatcaacgatggcagtagagattacaacatcggctttgatgtggctttgctccatcttcctaagcagattcaaagccgagacaaccaatcttacacaatccatttacaattgttcc

SEQ ID NO: 193618 - DNA, 138 bp, Arabidopsis thaliana landsberg
attaaactggcatccgtgaaactagcgatgaagtatatgaagagagtatccgcggagctagaggctattgaaggtggtggccctgaagaggaagagcttatagttcaaggcgtccgattcgcattccgtgttcatcag

SEQ ID NO: 193619 - DNA, 690 bp, Arabidopsis thaliana landsberg
atgatcctggcgacacgttattccagttctgtccaattgacatcaatgaacacattacttgcctggaaaggtgaaattttgaaagctgtggagatgactgaatcagaaattgatctccttgaaaacaaacataggacactaaagcttgaaggtagaagacactctcgtgttgttggacccagttcatactgttgtgatggagatgcaaatgtgcccaaggagcaggcttcttgtagtttggatcctaaggcaacagcttcttctgtagctaaaacactggtgagagctcctgtgcatcaggctggtttagccaaggttcctgctgatgtttttgaagatagtcctggggaagttaaacctctatcccaatcttttgccactgttgaaagagaggaagatatactgcccataccatctatgaaggcagctgtttcttcgaaagagattaacacacctgcttttgccaatcaggaaactattgaggtttcttctgctgatgacagcatggcctccaaagaagacttgttctgggctaagttattatctgccaataagaaatatgcttgtgaatcatctggagtattcaatcaattgcttccaagagattttaattcgtctgacaactcaagattccctggcatatgtcaaacgcagtttgattctcatgtcccagaaaaaattgcagatagg

SEQ ID NO: 193620 - DNA, 134 bp, Arabidopsis thaliana landsberg
caaaccatagacaaatacgaagtcgtcgagatctacaacatgagacgaaatcggagctcgagtttgagctgaagatatccgatttggttatcggaaaacacacaaatcgtaaatttgaatcggaaaaacgttag

SEQ ID NO: 193621 - DNA, 71 bp, Arabidopsis thaliana landsberg
aatgtaacattttccgatttacaatttggacatcgattatagatggattcggatcccaacagaaatgttaa

SEQ ID NO: 193622 - DNA, 310 bp, Arabidopsis thaliana landsberg
ccacaagcgcgtagagggctatcgcaacttcggcagcaaggtgtgcatctccgcgcgcttgtgtgaggcaatcggcatcggcacctcgcagctcatcggcccgcccgagctgaggctgccggtcatccgctggatcatcggggaagtcgccaagaccgcacaggcgctcgacctcgcggtccccgagttccgcttgttcgcgtacgccgacacgatctgccatttcgtgtgcagccgcttatgcgactggtatctgcagataatcagaccgaccctccagctgtctagagttgccgacacggatcaagac

SEQ ID NO: 193623 - DNA, 133 bp, Arabidopsis thaliana landsberg
attactgaagtccaacctcgacggcgagaatgaagaaaacctccgggaagagactgctaatgcagttcgtgaaggaagtatagatgaagctccgtgtgtcacggtggttacgacggtggaggcaccattgtag

SEQ ID NO: 193624 - DNA, 71 bp, Arabidopsis thaliana landsberg
gagacactgaaaaacaagaatataatgatgctacaaagatggcaagtataaaaattgtaaatcgcgactga

SEQ ID NO: 193625 - DNA, 206 bp, Arabidopsis thaliana landsberg
caatgctaaagccctcttctcttctgtgcttgtcacagaaattggtaatggtgctaacaccttcttttggagtgacaagtggattaatgccagaagtgtttctgatattgctccaaggctcctcttgactgttccaaaaagaattgtttctaaaagaactgttcgcgaggctctaactaatagaagatgggtctctgatattaaag

SEQ ID NO: 193626 - DNA, 84 bp, Arabidopsis thaliana landsberg
ctgtttgctgactattgcaatttggccatcgggaacgcaaagcaggtaaaaatccgattccgcataaacatcattgaggtctga

SEQ ID NO: 193627 - DNA, 26 bp, Arabidopsis thaliana landsberg
tacaggaagattcccaatgccgttga

SEQ ID NO: 193628 - DNA, 104 bp, Arabidopsis thaliana landsberg
tgaagagagttttagctttcgcgttcgccgcaactcacacattttatttttcttttgtcatgaatggcatggattatgaattcaggaattcccgttctatcaat

SEQ ID NO: 193629 - DNA, 160 bp, Arabidopsis thaliana landsberg
tggtgcctgtcctaagcatcgctatcttctcggccatactcctcagcatgttccagtggtacagcaaagtggccggacaaacagataaaaaacctgatgacgcaacgccgccggcggatgacggcatcctcggcggcatgatgaactatcagagaatatc

SEQ ID NO: 193630 - DNA, 361 bp, Arabidopsis thaliana landsberg
aagaagtatactcataacctcgagtgttatgtctccttggttgatgtattggctctggcaaaagatgtggatagaattaggtttgtaagcagtgagattaagaaatttgagtttcctatgactgtttctgcggcgaatgctctgattaagagttttgggaagcttggaatggtggaggaattgttgtgggtttggcgtaaaatgaaagagaatgggattgagccgactttgtacacttataactttttgatgaacggtttagtgagcgccatgttcgttcattcggcagagcgtgtttttgaggttatagaaagtggcaggatcaaaccagacattgtgacttataacacaatgcgcagag

SEQ ID NO: 193631 - DNA, 77 bp, Arabidopsis thaliana landsberg
gggacaaggtgaatcgttccaatccccggttacgtcacgtattggcgcattaccttcaaattcacgtagaggtcaag

SEQ ID NO: 193632 - DNA, 162 bp, Arabidopsis thaliana landsberg
ataactagtgaagctctccaaggggggcacacaagtctggatttttactacctcgctgacctaaaccggcactggatctcacccactgggtaaaccataccctgtatcctatgcagcttggaccaaaccagagtacggaaaggtgctcgattaattacatga

SEQ ID NO: 193633 - DNA, 438 bp, Arabidopsis thaliana landsberg
tttcttcaattcgatcaaaacaacaaagacaaaagctaagagctcgaataaagaggtcgattaaacaaaattctatacctgatttagattcaaaggatcgaactttgagcacggtaagttggaattagcgtttatggtttattggagttgacgaagaagctgtggaacttcaccgtcttcactcttgttcctctggagccaaagaaacaaaagggcgtaggttagactaatctaagcctacttggttaacgttagcgttcacagacagggtttaccgctaaacagtaatatttatatactcagggccttatatttcgcttattttgtcgtaaatcggcccattacaaaactgcactctccctcacatctctcaagtgtctaacgataatgtatgtttatgttattattatagagattgcaaaacttgagaaggtagtg

SEQ ID NO: 193634 - DNA, 311 bp, Arabidopsis thaliana landsberg
ttgctttgctccttctcatggagaatccggcggagaaacccgacccgaatccatcaacacccaaaatcgaatctgaagatgaaagagaagaactaggagatattaacggcgacgaagaagaagaggaagagtatgaggaagaagatgatgggaaacctcgaacgcgagaggatgcaatcgcagataggatcaaagctgagtctctgttccgtcgtatgcgagcaactccggtcgctgtgcgtgttcacgacgtgatcgtcaagggaaacgagaagactaaggatcatgtcatcgaggctgagggggatgtt

SEQ ID NO: 193635 - DNA, 375 bp, Arabidopsis thaliana landsberg
gtacacctctactgtatgcaaactagatcaacaggtaaccagaacctcctttttaatgacaacatcgaccgcataactcgcgaactcagagaaaggagaaacacagtcaacctaataccacaacaaccactcgaaatggctgacgaacagaatcaacaaaatggccctgccaacattggtgctggagacgcaccacgtgatcaccgtcagcgggaaggaattgcacctcttgctatccagaacaacaacttcgagattaagagcggtctcatctcgatgattcaggggaacaaattccatggtctgccaatgaaggatccactcgaccaccttaataaatttgataggctctacaacctaacaaaaatcaatggt

SEQ ID NO: 193636 - DNA, 115 bp, Arabidopsis thaliana landsberg
ataccatctagctgagaagaagatcccttccatccatgggttcacgacgggcctgaagcttgaacagtttatattcgacgccttcacatactccccgtccacggcacttttcgag

SEQ ID NO: 193637 - DNA, 49 bp, Arabidopsis thaliana landsberg
atgagtgtagccccaggggttttgccagtcgcggcaaacaacacccccc

SEQ ID NO: 193638 - DNA, 889 bp, Arabidopsis thaliana landsberg
atggagaaactacagaaacctgagaagaaaaaactctctgcgcttggcgataatggaacagtggtggagcttctatttttgcagctgtattctcttgtccctgataggcagatcaagcggtttctgggcctcgtgaggatggtcagggcctttgtacaccttcaggtgattgaacagagctctcccaagctgccacaaaatggtcagaccaaagttaagagggagttggaaaactagtaatcaatcaataccaatatcgcaacaagtagtttccaagttcaatccataagtttgaagaaacacggatttgctaagtgttaagacttaaaggagactaataaagagctgtggattatgtatctaacccgtccctttggaagcattccacgaacagcatgctcaacgattctttcaggaattctctgctgcaattgatcaaatgtctctactgtcataccaccaggtcgtcctgaatgcctcctgtacagcttttggttacgcttctttccagatacagcaactttctcagcattcacctttaaccaaacaattgaaaacagtattagaggtaccaagttacaagcattgcccaaacatctacatagaggctctacatcttgctgctaatgtgaatcttactaaaaccaaatcccaaggctcctccttcaggaagaaattaactaaagcagcacatcacatttcttattctctacagatagctcaaagaaactcataccacaatcacaaaagctcccatgtcgacactaggagtgtaagaggcaagattcttcccacggatgtgattagcaattgtcgatgccaatctaccaagaattttgtcagttgcatcaaccacaaaccagggcttgtccgtgttcacatggtctga

SEQ ID NO: 193639 - DNA, 108 bp, Arabidopsis thaliana landsberg
agcgggtgccggtcgcgggacgactggacggctctctggactttcccggggtgaacagcagccaacggcgcaagggaatcgctgttataacaacatcatggtcctcga

SEQ ID NO: 193640 - DNA, 195 bp, Arabidopsis thaliana landsberg
ttcgtcgcgctgaaaggcgataccgccatgctggtagctaaaaacattgacgccaaggaaggcgtgcaagtggtaaatgccaaaggcctatttgtaacgccgggcctgatcgacatgcactcgcataacttcttcggcaccaaaaaggaccatacttacagcaacggtcccaacgccctcccacccgacggataa

SEQ ID NO: 193641 - DNA, 46 bp, Arabidopsis thaliana landsberg
atgcctatctccaaggttcacgctcgttctgtgtacgactctcgcg

SEQ ID NO: 193642 - DNA, 473 bp, Arabidopsis thaliana landsberg
atgttgtgggcggccaatacctgggtggtgcccaaggccaaccggctggtgaacgccttccaggataattacgtgcaccggcatgaagatgcgatggcattgtatgataaaaccgtgcgcatagatagtttcaactatgtgacctttggttcctgggaccccaattataagaccggcgccagctttgtcatgcaggaagtgcatggccagaaagtgacctttaaactgaaagcagaccgcgtaagctgggacagtacggcgaagaaatggaagatgtacaacctgtccatgcgccacatcaatgacctcaatgaaagctggacctataaacaggactcgctgatgaagctgcgcattacacccatagacctggtaaagaagcgtgatgagcaggtggccatgaccacgccggaactcaatgagtatattgaaaagcaacagttgcgtggcgcagaggggctcaatactacctg

SEQ ID NO: 193643 - DNA, 115 bp, Arabidopsis thaliana landsberg
atgccggtattggaccgaagccccacgcgtgggtggaattgggagcgtgtgaccggtcaggaagacccggcccttgccgcatcgacggaatgcgaccggcaaatccacatacggg

SEQ ID NO: 193644 - DNA, 392 bp, Arabidopsis thaliana landsberg
atgccaaagctaaagactttgaagatgactactgactcagagaactgtaccgtattctttttcatttcttcgtcgtgcaattacgagaaatcaggattccggttggtggaccggtcatctgaagttggcacctcccgtgcagctgataagagtaatgaatcattccaaaatgagctttgactttgaaggtacctctaatctcatattctatcttgttgttttccagctgtctcctgagttccaccgcgtggtttacaggcaagcctaccaaactagagatcaaacggattggttccaacctcgtctcatgctttttctgcaagaatggctggaccacttgcgctgcaatcaatctattgaagaagaagagctcaatccgaagcttctcaaac

SEQ ID NO: 193645 - DNA, 329 bp, Arabidopsis thaliana landsberg
tgcaatgaagtattcgagcagctgaaggtattattgaccactgctccggtattggctcaaccggacattgaaaagccttttgatgtgtattgtgacgcatccaacagtggacttaggtgtgtcctaatgcaagagggccgagtcatagcttatgcttccagacagttacgccggcatgaggagcactatccaactcatgacttggaattagctgtagttgttcgtgccctcgagatatggcgtcattatctgctgggaaatatctaccatttatatacagatcataaaagtctgaagtatatttttacccagttagaactaaacatgag

SEQ ID NO: 193646 - DNA, 1048 bp, Arabidopsis thaliana landsberg
atgatggagaagattgcaagagatatttcaaacaaagtaaacactacaatctctagggattttgaagacatggtgggagttgagacacacctggagaaaatacagtctttgttacatttagataatgatgatgaagctatgattgttggaatctatggccctgcaggtattggtaagactaccattgccagagctttgcacagtctactctctgataggtttcagcttacttgttttatggagaatcttaggggaagctataatagtagtcttgacgagtatggtttgaagctgcaattacaagaacaacttctttccaagattttaaaccaaactggtatgagggtatacaatttaagtgcaatacagggaatgctatgcgaccaaaaagtgcttatcattcttgatgatgtggacgatctgaagcaacttgaggctttggctaatgaaactaactggtttggtcctgggagtaggattattgtagccacggaggatcaagagcttttggagcaacatgatattaacaataaatatcatgttgattttccaactagagaagaagcttgtaagatcttttgtacatatgctttcagaaggagctttgcaccatatggttttgagaagcttgcagaaagagtaacatggctttgtagcaaccttcctctaggtctccgtgtcatgggttcaactttacgcggaaagaaagaagatgactgggaaggtatattgcgtaggctagaaaatagccttgatcgaaagatcgatggagttcttagagtcggatacgaccatttatgtgaggacgatcagtttctatatctcctcattgcattcttcttcaactacgtcgacgatgatcatgtgaaagcaatgctcgttgaagatagtttggatgtcaaactcgggttgaaaacgctcgcgtataaatctctcatacaaatatcggcggaaggaaatatagtgatgcacaagttactacaacgagtgggtagagaagctattcaaagacaagagcccacgcaacggagaatcttgattgatgctc

SEQ ID NO: 193647 - DNA, 710 bp, Arabidopsis thaliana landsberg
aggaaaacggcctgcaaatggagccggtaataacgtgggtgcaaaaaaggctcgtgtgcagaatcaacaacaggttgtgaacaaaagatctgagggaatctcacacggtggtggtagaggcagtcacagaggccgaggccggggccaaggtcagggaagacacagtggtggtggtggcggccgtggccgtggaagaagaggcttctggtaatttcaaaggattctccatgacactcttttttgtctgttcttgtataacagagtatgtttatccttcttgttttggctcttttaggctcctaacattcgacaaacaaattaatctcttttgcgatttctttggcttctcctttatatgacaaattctttgttttcttttctctttaactaccctttctgggaagtcaactgtcctaaactcataatgcaacagtcagaaatgattaatgccaaagtaacagtaaaaaatattaatttataaataaccccttcaaccttctctgtatttatcaacttaatgtcactccatgttatatattcgacaatgtaactctgtgtttcaacgcccatgcatccttccaatggcacaacttgttctgtccctgacttctctctttctagcctctaatctttaaatgatctcatgaaactggtgtgtaacttcctacagaatccaacgaagccaagcccagagctattaaagagacttg

SEQ ID NO: 193648 - DNA, 93 bp, Arabidopsis thaliana landsberg
atccgtaaccagattaaacagggcaagtccatccgctaccttgtgcaggataacgtgcgggaagagattgagaggaataattactataagtag

SEQ ID NO: 193649 - DNA, 253 bp, Arabidopsis thaliana landsberg
aacttctagaaacgtcccggaatcatcatccaagatgcttggctctctactcgtaagtcgttcccctattttttatgattagtgacaattgatgttttattctttttacggttaaccaatccaaaccaaaagacctatttgatattcataactctttttcaggtttggttggtttggttatacccaatatttagaaccgccggttggagctcatcgtaagcaactgtatcccggaaccacaactaaagagtaa

SEQ ID NO: 193650 - DNA, 405 bp, Arabidopsis thaliana landsberg
cgctggcgggggccgcgccgccggtacgccccatgggaagccgtggcggtgcttgccgccgaggtgtacggcgtgctggtggaggcgtacatcccgttgccggacatgcccatgcacggcgacgggtttagactgcacctgaccggcatgaccatcaacttcatgctggcggcgctgctgctggcggtcttcgtcgggcgcaccagcggcgcgctgaatgcgcagcgcgccgcaacccaacgcctgcgcgaacgcgcgttgcgcgacgaaagcatcctggccattgcgacccatgcggtcgatgccgcccaccgcctgaacacgccgttgtcaacgcttcgcaccctgttgacggagctcgcgcgcggacgcgagcacgacggcgctctggccgcggacatccac

SEQ ID NO: 193651 - DNA, 175 bp, Arabidopsis thaliana landsberg
atgatgaaggaacggaagatgatgatgaagaagttaaggtggtgaggggtatgcggtttgcccattcataggcctggatgggggatcctgctgtcctggaatacatatactcccaccctgtaggcgatgttggcaccaggacggcaaaggctcgcccggtcttccccctgattga

SEQ ID NO: 193652 - DNA, 326 bp, Arabidopsis thaliana landsberg
cgctcgtcttcttcacttattggttataggcttcggcccaattttaccattttggcccaatttaacattaacttatttgtggttggtttggaaataggtaaaaaaaatatggttgacaaaatgaaaaagactacattattttataggagaaaaatgttatttaatacctgaactttcaaaaagtggtcaaattaaccgtgaacttttgaaatggtcgttttatacctcaacaaaaagttgacttctaatttaatttataagttatagttgatccggccaaatcgactcaccgttaatacttcttaacagctctcctaacagcgtaa

SEQ ID NO: 193653 - DNA, 247 bp, Arabidopsis thaliana landsberg
tcgagaggagtttattaggttccaaggtttgaaaattgccaaagagatttgggacgtactaaagaccgcgcacgaaggagacgaggtgaccaagatcaccaagatggaaacgatcgagggggagctcggtcgatttatgctcaaccaaggagaggagccacaagccatgtacaaccggctcaagaccttggtcaaccaagtgcgcaacctcgggagcaccaaatgggatgaccatgaaatggtcaag

SEQ ID NO: 193654 - DNA, 456 bp, Arabidopsis thaliana landsberg
  unsure (1)..(456): unsure at all n locations
atgctcaatacgctgcgcaagatcgtccagnaagtaaactccgccaaagatctcaagtcggcgttggggatcattgtcttgcgtgtcaaggaggccatgggcagccaggtctgctcggtctacctgctcgacccggaaaccaaccgcttcgtgctgatggccaccgaaggcctgaacaagcgctccatcggcaaggtcagcatggcccccaacgaaggcctggtcggcctggtcggtacccgggaagagccgctgaacctggaaaacgctgccgnnnnnnnnnnnnnnnnnnnnnnnnncgaaaccggcgaggaaaaattcgcctccttcctcggtgcgccgatcatccaccaccgccgcgtggtcggggtattggtcatccagcaaaaggagcgccgccagttccacgagggcgaagaagccttcctggtcaccatgagcgcccagctcgcaggg

SEQ ID NO: 193655 - DNA, 149 bp, Arabidopsis thaliana landsberg
atggaagtacaaatgtcccgcatgttcaattcgatcgtgtgcccttccctgtgtgaaagcccacaagcagcgaacaggttgtaccggaaaaaggaagttcaccgacgtcgttcccctctccaagttggacgacaatctcttcctctctg

SEQ ID NO: 193656 - DNA, 325 bp, Arabidopsis thaliana landsberg
atggagaacgccacaattctcacggttaaggaccttgtcaacgaaggccgtgccgtcaccggtgcatcgtcgctattctcttccgctgcttctcactcgtcttccgaatcagccagtacgaaccctaaatcacatcacggtgccgttgattcagactttagccgtaagtttctcacaccactgaatcacccagcggttatcgtcgggacgatagctcttccttctgaaaccctaaaatgtccgaatcgctactgctttcgattcacagacggtgatttgacaatctgctgtgatatccttggattcgaaatccgcgcgattggaa

SEQ ID NO: 193657 - DNA, 453 bp, Arabidopsis thaliana landsberg
caaggcaacacgatcagcgacaaatcatcgacccccgccaatacccgctacaccttcaaggatccaaagagctacctgaagctcgactggaacatcaacgactccaacatcctggaactgaccggggtgtcgcagacccatcgctccgacgcttccgactatgcctacgactacgacagcggcagcactggcggcttcgtcagcaaggacacaaccaacaagaccagcgcaaaaatctatgtggccaagttcaccagctacattaccgacgacctcacgctgagcgccatgtacggcaagtccagcatcgactacttcacccaggtgcctgactccggcgtggatggccccagcattcgcggacttgaccaggagaacccggcatatgtcgggaaccaaccgcgcaccaacggccagaccattgacgtagtcaacaatcccagccatcgctaa

SEQ ID NO: 193658 - DNA, 459 bp, Arabidopsis thaliana landsberg
atggctagcatcgtggtgaatgttcatgactatggaacttgggtggaggatggagctcgggttcagtgcacattttgcgacaagcgaatgaatgactttaatcgtctcaagtatcatttgggaaatgtctgtaaggacgtaaccccatgctcacaagttccattacctattagagaggcattttttaagatggttatggagcagagatatcctgatcgtaaacgtggaagatccaacaaaggttttactgcttctgagacagctgcggaagctgaaaaactagcccaaatggacgttgctcagttcttttatgaacacggtgtcgacttctctgctgtggattcgacaagtttcaaaaagatgatgatgatcaagacagtaggaggagaaggtggtggtcagatgatccctgactctcgtgatttaaacggctggatgtttcaagaagctttgaagaag

SEQ ID NO: 193659 - DNA, 506 bp, Arabidopsis thaliana landsberg
attttgaagaggacgagaggagacagtgagcagaagaatgaccaagagaccgaggtatgtccaagaaccccctctggtccagcaaagaatcaagatcagtctgtagttcaaaagctgaaaagacgagatagcaaagaagcaccagtctctgagccgcctaagcaaaagacttcaaagaggtcgagatcagatgaccaagaggcggttggaagtctctctgttccaggaaagaatcagcatcagagtaacaagcatgacacaaatgcaccgatctgtgagccgcctaagcaaaagaaccattcgaaggagtcacgaaaagtgaaacacaacgacttgcctgtgaaggagattaaagatgcaaaacaaggcttcgtttctgacaaatctatgagtgatcttctaaaagttcttgagaaatcaagtcagcaagtgtctaacaaaggggagaacgactcttcatcatcagagaagacgaagagaccgagaaatctctcaagtcttttcag

SEQ ID NO: 193660 - DNA, 1105 bp, Arabidopsis thaliana landsberg
  unsure (1)..(1105): unsure at all n locations
atgatgatgggtgagttttataatagttacggcgaacttggtcacattggataatttgtcattgctcttgggcggaccaataaaagcctctcttttgaatcccccacacagatctatcgcctcttctttcctcgtgtctgccnnnnnnnnnnnnnnnnnnnnnnnnnnnnnnnnnnnnnnttcttcttcttcttcttgtttcgatttcaagttcttctctttcgtgacctacggtgccgcttcatattccctaatttgattgaaaagggttgcgcaagggctttgaagtgaaacacttttgattcttgttgttgcttcaagttttcatttttatcaattgggttttggggaaaacactatgagctgtgattgaattgtctagctcgaagaatcttgattttgtttacacagagaattggtttcttctttcttgatgatagtacaattggattctgaatgttgtgtagagtttttggaattgctcattggtgtatgcttttgttatgcagggtttatctttggtggatgattagtgaaactttttaaggagatattagttcacatgttttagttaaaaatggcagcttcaagcggctctggtttggaaggttagaaacatgacctcaatccttttgttgttatgtattctttgtgtatactgactttaggaagttatatcgagtttccatttctttatttccgtttcttagagtgttttgcttttacgtttaactttaaataagaatgaggtcttgtttctgagactcatcaatttagagagctttatagggtagctttgagcttcgtttattggctttgctgaggtattttgtttgtatgtattgttttgatttgaataaagaagaacttttgggatttattctgttttttgctcttgactatatcagctgaggagggggaaataagtatagacatggaggaacacatggatctaacagaagatgatttcagaaatgtgtctggccagttttcaggacaagcatcgatcgtggaggttggggatgctgttgatgtgagagtcgaaaccgtgaaagtagatgttagttgtatccttattcttcttcttattgttggagcttgctaa

SEQ ID NO: 193661 - DNA, 232 bp, Arabidopsis thaliana landsberg
atggaccgaggttggatgtacaatgtgccaagaccacatccgtcgtacattcgaaatttgagaagctttattgaagcggccaacaagcacgcgaatttgcgaaagagcaaggagatattatgtccgtgcatcgattgtgataataagatagcttggagagatataggagtaatccaatcacatctgctaaaaagagggtttaaaaacaattacacgatatggtcagaacatg

SEQ ID NO: 193662 - DNA, 4033 bp, Arabidopsis thaliana landsberg
atgcaggcctcgaatgagaaattagacaaattcattcaactaaaaaagaggcaagctcactttgcttgtaaggatgagcagtttcaggttcagtatttggggaataatcagttagaagagacaagatacatccagaaccagggagcctatatcaatggtttcaacaactatggacaacagcaaacccattacaagccttttgttccatacaatcaatgtcaagggtttgtttctatgcagcagtgtcaaggaagctaccaacagcagcagtatgcaccaccatgttttgctcaacaacaaccaactcacaatgcacacgatgcagacatgaaaactatgcttcatcaaatactacaaggtcaatcttttggatctatggttttggagacaaaaattgttgagataaacactatggtggattccttttataatgatctgaatatcaagtttaaggctttgaactctaagatgagatacatggaaggacaagttgcttctacttcagcaccaatgcctccatgccaacttcctggaaacgccattcaaaactccaaagaatatgccaatgtagttacacgtcgtattgggaggaaacttctcaacagtcagaagaccgagcagatcactgatgatagtgaagttaaagaaggagaggatccacatcaaaacaaattccagaccaatgaaccaactaaacttgatcagccttcagattcacttggccttctactcgatcgagcaaagccaagttttgaagaaagaaaagctaatgttgtagcaaagaataaagaatttgctctgtcaccctacaaactgacaatgcctttccctggaacatttaagaaggaattaacagaaaaatacaaagccctttttgataggcagctaaaggagattgaactaaaaatgccattaatggatgctttcatgctcattccaccctcccacaagtacctacaagatctgattatggagagaatcaaagaagtacaaggaatggaagttcatagccaagagtgcaatcctattatacacaaggagagtgccaagaaaagctagaagagcttgctgttgaagatcaactccaaacttctttgactaagagagttgaagctaaatatctccctaatgagaccttgatctctatgaagtcattagtctcccacaagattatagcaggggtagatgtcgttaaaggtgtgattaggtcaaaaacagaggttatgacaacaaaagaggcatgttctactcaagctcgaccatcaaactcgactagtaggtcgtgttcaacctccactcactccaaatgctcaagctcaacgtctaaactcgacctgcatgttaagcaaaccactgtagcatctgataattggttaaagcttcagagaagatctaaatggcaggagaaagccataagggagctaacacaaactgtgaaagaactcaaggatcaaattaaggacctccgtgggaaatccaaccaagtaccattcaacatcaaagacaaaccccctgatggaaccaccaccttagttagcaaagctgaagctgaactcaaagtgaatgggcagagagtcaatccttgtatggctgagcagatcattcaagagtagtgctcatttcctctcctctcatcatcctttgcctaaaaacagtatgaaagtcaagctaaagactttacactagctcacttgggaggaagtcccatgtctatccatgtatataagtttatattttgcttgttatttttgatgtttttgtttaagtgtttcaggtttgttttaattaccctgaggaagttaacggtcgagtaaattcaaaacaagtcaagaatcatctcaaccgttgatctagtaaaatgaggaggagtgctttaagtcgtgcgattgaatgaccagataagagaagcatcaccaccgtttgatcgagtgacttctttacgtttattctggtccgtttgatcgagtgattaatagcgaagcactccgcaccgtccgatcgagtgaagaaaacaaagagaccaccttgtggactccgacgcctcgtgacccgcctctattgaatcccatgatgcctccttgtcttcttatcccctcataatcattttggttcaccccattgcaattcctaaactcaacagtctcatctctccacctcccacaccagagcaatctcgaattcttatacctctctctatctctttctcttgcacttcctatttttatcaaaaagtcaactaaatccatctattttcttgatcactcaatctgctaacctttgagtctctcattctcaatgacgaacagatgcacgctcctgtcaaggatcgggaacagagctctctctccatcgaagaggtacccaacaccttcttcgtatgcaggagctcaaggactttctgaaccatcacccctagggttgagcaggagagaacgagcaagtttcgagatcgatcacagcgaatcaagccaagaggaggaagcgatgcaagaagaacaaacttttaactctcctgtcggaaacactctatcccgaaggtcgagtaaggcctctgcaaaggagttctcgaggaacaaggaagatatcactcgaggaaagaagccagtgaagagaaggttggaactggtagatgaagactcagaggaagaaatggcttcacctggaagctgatcaaactgagaatggaggtggtgatgatttggaatcagagaagtccgcaactcaaaacgagtactacaagctactgaagcgcaacgagtttttaggaactcgataccctgatcctgtaaccatggagagattcggcatctatgatgatgtagactacatgtttaagcaatgcaacctgaatattcacatgtttcggccaatggaggcgtatgaggaagagaccatccagtttctttcatccatggaattgttcttatatggagagtcagaggacgataaaatcaggccagacggaattttgggatacttggagttctgtgtgtatgacgtagagtatcggcttccaatagagcatcccgagctgatgtatgaatttccaagcggaaaagtcacaagtcatcgttttgacaagagagagcttcagtcattctgggccacacttgggtctaagcatggattttcatcctctagtaccaagagcaacgagataaggagtccggtggttagatactttcataggtccttggctagtgtgctatttgcaagagaaaggaatggaaccttcgtcaatggagaactagagctgatggagacagcgcttcaagagctgcttggtttagcatcagatggtacagttctagctggagatcagacagacacttcggtctcattttcctaatcgagcacctgctgagttacagaggatgggctaagggacttaagaaaccaggaagaatggttgtgggaggagttggaaccccaattctgagagcatgcaatgtacctctgcattcaaagtctattcctccgagatggattgatatgcaacaccttatcaattccaagagtttttggtcacagtagaagaatagcctatataagtataggttcgatcaccccacagcaggacaatctatttttctcctcccaaaccccgcttccacttcgattagagatggtggcaacattgagttctgcccaccaatggagaacctctatacttcaggtgatgaagctgtaccgatggaaggagtgaataatgatgagtcctcaatccatcattcagataatgaggcagaacctatggacgagtcttacacaacacaacagttttactttgaggagtactccgcaccgaggcaaagtaaagactataaagaaatttacaagcgccttggttttctctacagctggagtcaacttcaagacaaggctctcgcagcactcaacaagaatttttacgctctccaactctagttcagctattcttcttctactacggcaaacccaccggacatgccttttaggagaagcggatccactcgacatgaacctatgcaatatgatccgccttcgcagataa

SEQ ID NO: 193663 - DNA, 264 bp, Arabidopsis thaliana landsberg
aaccttaaagacaaaatttcagacattggcgatgggaccaacagaatcggacaagattgctcaaaagatgatattgttctctttcaaggctcaacaaatccacttcctagtggagttccttcatatacagttgagatcttcaactcttgtgtctcggattgcaatatagcagagatcctcgtcagttgtggctggttcagctcagtcagactggttcgccctcgagttttctgtcgcctttggctacagcgattgtctggttaa

SEQ ID NO: 193664 - DNA, 488 bp, Arabidopsis thaliana landsberg
atggctgggttctgtagaaatggccatggcttgaaggcactaaaattattcactgatatgctgcagagaggtgttgagttgacggattttagtttaacaagcgctgttaatgcttgtggtttagtttcagagaagaaagtaagcgaacagattcacgggttttgtattaagtttggaactgctttcaacccttatatccagactgcattgcttgatatgtgcacaaggtgtgaaaggatggcagatgctgaggagatgtttgaccaatggccttctaatctcgatagctcgaaagcaacgacgtctataatcggtggttacgctcggaatggcttacctgataaggctgtatcgctattccatcgcactctctgtgaacagaagttgtttttagatgaagtttcgttgactttgattcttgcggtctgcgggacattaggttttcgggaaatgggttatcagatccattgctatgctcttaaagctgg

SEQ ID NO: 193665 - DNA, 157 bp, Arabidopsis thaliana landsberg
atctgcgacatgggctcgtgtatcggtgtggctgcttataggagtgattgtgtatgttttctatggtcggaaaaacagttcgctcgccaatgcagtttacgtaactacagctcatgcggaggagatatatcgcgaacatgaaggttctttggcatag

SEQ ID NO: 193666 - DNA, 536 bp, Arabidopsis thaliana landsberg
cagcagaggattgggaaggagttgctgacataagatcaaagatgaagagtatgggagtagagaaaccatctggagctagttcggttgaattggaggatgggatacatgaatttacagtgttcgacaaatcacacccaaaatctgatcaaatatatcagatgcttggtagtttaattgaacctccagatcctggtgagctggttgctgttcgataaactgcttagtttatgtccagatcattaggtattatatcgattataggctgtgagcatcagcactgtggcctaggccaaaaatttgtagttcattttccaaaggaacacaaagatggttttatccttgtaacgagttcgagtactgtatatagagcataatttataaatcttgagatcaatttgattttgcaatactaactcccgtctccagacatggggtttctggttcttaatccaataacaggttctgtgaccaaccttgaagatgacagtaacaagagaagactaggcaggaccaaagacattcaaactcccacataa

SEQ ID NO: 193667 - DNA, 195 bp, Arabidopsis thaliana landsberg
gaacccgacatgtccagtcgctctcccggattcttggcgatgatcatagacgccaagacacgcgtcaaggaaatcaacgccagcgaaatgctgcagctgatggcgcagaaccccagggcgcgcctgatccacgtccgcgaggaaagcgagtacgccaccgcccatgtcgaaggcgcggaatggctcggcaaaggc

SEQ ID NO: 193668 - DNA, 394 bp, Arabidopsis thaliana landsberg
atgcgggggacaacggatactgctccagcgcgggcagcgcgaggtggccggggtatctttgccggatcgacgaatgccagagccatgcgctgtgccggatgcaccgacagccacttgtcgacatatctctgcaatgctccatgtgggatcgtgaacttactaactcggctacctgcttccccagcaattttgggagctggcgcggatggtcgagcaccgtatcggcacttcagttggtcggttcgacgacatggagataggcccagcgcaccggctccgagtacagcccggtggcacggtcggcctcgacgtcgcgcgcgtcgtgacccacgaacacgcaacgcgcgttgtcgactccggctctgttcgcaggccacaagtaccggcgcggtga

SEQ ID NO: 193669 - DNA, 464 bp, Arabidopsis thaliana landsberg
atgccggcaacgtcggcttccagctcggcggcggcggcaccattccgttgtcctcgctggtcagcgcgcaggtcaccagcgcaccgctggtggtcagccatcagcagcaactgccggcggtgacgctgtcgttcaacgtggcggccggctactcgctgtccgatgcggtggacgcgatccacgaggtcgagcagcagctgaaattcccgccgcaggtgcgtggcgagttcgtcggcaaggccgccgagttcacctcctcgctgggcgacgaggtattgctgctgctggccgcgatcgtggttatctacatcgtgctgggcgtgctgtacgagagctacatccacccgctgacgatcatctccaccttgccgccggccggcgtcggcgcactgctggcactgatcatgtgtggcatgagcctgtcggtggacggcatcggcggaatcgtgctgttgataggcatc

SEQ ID NO: 193670 - DNA, 141 bp, Arabidopsis thaliana landsberg
atggagtttccacctcgcctaaggttactccattgggatgcatacccaagcaagtgtcttcctcttaaatttcgggcggaaaatctagtcgaactcgatatgaaagatagccggctcgagtacctctggccaggaactcag

SEQ ID NO: 193671 - DNA, 351 bp, Arabidopsis thaliana landsberg
atgccggcgccgatccgcgcgccggcgtggcgcgcgctgctgtcacgatcgcgcagcggaatccgtggtcgcccgcaccgtgaaatcgatcgccacggtgtcgtcgaccgccagtgcgccgccgaggatcgcaaacggcgtgatgccgaaatcgctctgccgcacggcgaaacggccgctggcctgcaacatccgcgcatcgtgttcgatgcgcagcacgacgcgccggacctgcgtcacgccatgcagcgtcaccgcgacgtcggcgaccgcgagcggccattcgccgctgatcgccaccgcgttcagcacgacccacggataacgatcggcgtcgagcgacttcagcag

SEQ ID NO: 193672 - DNA, 513 bp, Arabidopsis thaliana landsberg
aacttcaaaaattccaagagcttgggaaagaagaacctataacatcactgcatgatggaggagaaagcagcagttgcatacacgcaggacacgaaggagctagtgaagcaagctcttcttaccggtttgggtctgaaaagatgggagaaatggaattaacttctctagattccgagatactaaacctggtgaacaatgtagagcatctggagatcaaactagaagaagcaaagcgtattctcgaggttaaagaaacacaaatccgtgaactcgaatctaccataaacgtttcagagacgtgtaacggaggaacagagatcgggatagaagacatcttccagcaaaaggtggaggcagagattgaatatatcatattctcaagatcagtgggaaacctaaagagacggatcaaactgattgaagaagagaagacattggggctatcaaagcttgataaagcagaaacaaaagctgagaatctaaagaatcaagctcaagatttacaaaaccata

SEQ ID NO: 193673 - DNA, 817 bp, Arabidopsis thaliana landsberg
aaccgatgccctcattcagaagactatccgagaagaattcaagtcatgcacgatgctcattatcgctcaccgtctcaataccatcattgactgtgacaaaattctcgtgcttgattctggaagagtatgtattttatttttaaacactctctctctttcaatctcacactctccttgtttctcagctaacctgttctattccaatttgttaactcaggttcaagaattcagttcaccggagaaccttctttcaaatgaaggaagctctttctccaagatggttcaaagcactggagctgcaaatgctgagtacttgcgtagtttagtactcgacaacaagcgtgccaaagatgactcccaccccttacaaggccaaaggaaatggaaagcttcaactcgctgggctgcagccgctcagtttgctctggctgcgagtcttacttcgtcgcacaacgatcttcaaagccttgaaattgaagatgacagcagcattttgaagagaacaaacgatgcagttgtgactctgcgcagtgttctcgaggggaaacacgacaaagagattgcagagtcgcttgaggaacataatatctctagagagggatggttgtcatcactctatagaatggtagaaggtaaacaaatatatgcatctctacaaatgcttatgcaaaatcttaatcaccacactgaaacattaaagtcaaatcgtgctcttatattgaacgcctgctttccgctgtctacgttttcagggcttgcagtgatgagcagattggcaaggaaccgaatgcaacaaccgaattacaatttcgaatga

SEQ ID NO: 193674 - DNA, 380 bp, Arabidopsis thaliana landsberg
agacaccgacggcgatgtacacagctttgacgctgacgacgacgatacgggtgacaccttcgacatcctcgaatacctgaatgacgacgatgacgataacgacgacgacgtcttcaaggtttttgaagataaaagcgccaagggcgattacgcatcggtgcgtccgcgcttcgacgtcagcgccggctcgctggtcaccagtaccggtgccgaatatccgttgacgctggtctcgcagccggactacgtcagctatccgctcagcgtcggcaaggacgattccgaaaccttgctgctgacactggagctgacgttctcgctgatcgacgatacctcggacagcggcgactatgagctcaagccggtcatccgcgtcgcgc

SEQ ID NO: 193675 - DNA, 425 bp, Arabidopsis thaliana landsberg
gtgctacaccaggatcaggagccagctttggttctatgacagtaagtacctttttcggtttaaaactctcattttcatcagatatattttggtagatcattacgccccaatctaacaattgcattcaatgcgtgcatccttcagttatgtccttggaatattgtctaaacctgaacttcttttttctctcccattgcagaaatcttcaaggccaaaatctcgaactacacgccgttagacatgggatatctcaagtttcatccctcagcctgtcaagtgtcatccctcagcctgcaacatcgcatcgtgtacatggcttgagttcatcgtcttcagttggtgaagtcgacttcggtgcaagttcgaagcagatccgtattctcttatgcaccagtttgtatttgtggcgttattcattgaattga

SEQ ID NO: 193676 - DNA, 230 bp, Arabidopsis thaliana landsberg
aaccttcccaaggccaagaaatcataaatattctccgcctttatggcgaggcttcaggtcaacagttaaatactgctaagtcttcggttatgtttggtcatgaagtggacaattctacccgaaatactatatatgcaaccctctacatacataaggagggaggtttgggaacttatctgggccttctagagaaaatccatgggtcaaaagcccaagtctttcgtctgtga

SEQ ID NO: 193677 - DNA, 263 bp, Arabidopsis thaliana landsberg
caaatcaaagagacgaggcccaatctagtcaggctaatcaaattgagattccgaagttgatagatgaatcagatcgggatggcgctgacggttatccggctagacttacagaaaacccggtaaactatctgaatcgattcaaacccctcatcgatctggaagtcgcttacaacgtcaatccgagatattcagaagctgaagtcgtggcgaggctacttccaattaagaccgccgaatttgatcttgatccagttgtcgactag

SEQ ID NO: 193678 - DNA, 259 bp, Arabidopsis thaliana landsberg
atgctctgcaacatccgtgagaataaagtgattctgaaacaagaaagggaagccgctgagcttcaacaaacccagaagaaacctgcaaactctgttgggaatttcgtcgagcaactggcgggccaaaaacaggaactttcgttggtgcatccttcaacagaaaattcgaaaaaggattcgcacgacgaagatttgggactaatcaagcagactcaacatcgttttgagcttgtggatgcacggattcagaacatagaga

SEQ ID NO: 193679 - DNA, 537 bp, Arabidopsis thaliana landsberg
acgtcgaggctggccaatgcccaaaggatggaaccgacctttatggtttagatcagcagcaggagcgaagacgaaaaattttgcacttttacgtctatgagagaaatcgatgcgaggtgatgtctgttgaattcgatcttatatctcctcagaaatagagtgtcattccagaatgatctaaataattgacttcgaaattaactttgaactatttcttactgtcttgggactattagtctcactgaatttcgatctgaaacatgtcttatcctgtagatgtgggcataattcgaaagaaggatctacactgattactgcctcttagtccttaggtcttatcgtctcctaacactatcattatgcttgttccaggcgatgccgtggcgtattccgattcggacagagcgggtcaagcctgacttggcaccaaaggcccttctgtttttgttctattttttagaaactctgctccagtcccggatagttacgatagcactatccaaacaaaaattactcttcactgaacgcaggttttaa

SEQ ID NO: 193680 - DNA, 979 bp, Arabidopsis thaliana landsberg
atgattgaatgtggaactgtgtatcgcaacaactcgtcgtgtttcacgttcaagatatgtcccagtcccacctctataaataaaacgactaagaggtagcctccctaaacaacatacccatattataataattctcgttttagaaattttttgtcttcaaatagtggagaaatggattcaagattcaccgattccacaactaccttaaggttcttctcaccaattcatcttcacatcatatagttgtatatgtgaatttgacatagatgtattcatattggtatgattgtatacgtatttgtttatgtgatgcatgcagatgtaatggtaagagtgaaaatgagaggaaaaacggcgatgaagaaagaattagtaaatactcctttgtgagtccactgtgtatgcgtggaggagatggatacaatagttactccagcaattctcttcttcaggtattttttttatatatatttctttcattttgataagacttatccatgccgaaatttagagtcacattagttattttgttgttttggtttttttcggtttgttgaatccatgattaaactgaaaccgaattttcttttgtagaaccaaattggttcatcagtttgttttggtgcgattttggatacaacgagttaaaaacaaaaataattaatttagttaatttggttgagtttacattacagtggttctctactaaactaacaagttgttaatttgtttctttttatatttttgtgttttcagagaagagtgttatcaaaggctaaaccggtattggttaagaacacaaaggacctgatgataaacttaaactttcctacatacattaaagtagctgatttgggctgttcatcaggacagaatacgttcttggcaatgtctgaaattatcaatacaatcaatgtgttttgtcaacagaggaaccaaaacccaccagaaatagattgttgtctaaatgatctcccta

SEQ ID NO: 193681 - DNA, 295 bp, Arabidopsis thaliana landsberg
atggcgatgaattcgaagaggaaaacaccacctgggattgcgcttctgaggagagtcagaggaagaaattggagtccaaagacgtttcggtacgcgattttgtttattactttcatcgcatatgcttgttaccatgcttctcgtaaaccaagcagcatagtgaagagcgttttacacccagactcaagcactaagccacctcaagaacataacagcgacaaaatttatccttggcctatgggtaacgtgtttgtgaagagagaaattggtgatatagatgaggttttgttgcatc

SEQ ID NO: 193682 - DNA, 151 bp, Arabidopsis thaliana landsberg
atgtcctcggtcgaccgtaggtatacagccacaggcaagccatattcttgttatttttattcggtccaaagagaagatagagctcgaaattttgtatcgagcgtaattgatgtaattggtgccagagaaacaggcaaaatggaaattgtag

SEQ ID NO: 193683 - DNA, 1114 bp, Arabidopsis thaliana landsberg
aaaactatgagcttggaaatgaggatgaagaaaagaacgagagatcatcgtcagattcagaagagaagtcaaacctagagaatttgcttgcgacacaagaaaactacgagctttactgtcctagctgtagcacatgtatcaccagaaatgtggttctcaagaaaagaaaacgagggaagcacgttaattcatctctggatctgaaacccgatataccggttgttgaaccggacgaaccaagcgacattgaggagatggaatcaccagttaaggtttatgtccctgagactcggattgaggatgatcaagaagataaagagggaactatctttacttgcttggtttgtgatctaaagtacttcatccggttaggtaaatcaaaccttaattaaaccggttctgagtcaattctttccaggttttcttggttttgtaaacttgatggatcaaccctggttttatattttaaatttcaggaaaaaagttcttacaacttgattatatcaggggaaaaccggttgagaaatcaggtatgttatcgtgaattgaaacaaaaatattactcctctcacctaaaccggactagacaaattgatttcaatttgggaaaaaatcaacaacggtttctttgatcataaaaaatgtttataggcttatctttggtatttgaatattcgatagaactacatatattttgtacccaaagaaaatttgcaaactatatgcagttgaagaatatatagatgtgaggaagagtataaacaccacacaatcaccaccacaaattcaaccggacggagaaagattcgccattgagttgttaaagagcaccgtctacggcggtctcactgagaccatcaccagcctcggcgttgtatcatctgcttctgcctctggttcctccaccagtaagtctctagactccattttccttttagttagcaaacaaatgcgagattagtttatcggctatctaatcatcagattggtccttgttataaatagtaacactatataataatttcgtctattattttttgttgttgtttcagtgaatatattggctcttgctgtcgcaaatttggccggtgggctcatcgtcctcgctcaaaac

SEQ ID NO: 193684 - DNA, 215 bp, Arabidopsis thaliana landsberg
ccaccgccccgaggagctccctgtgtcgaagatcgccctcacacctgaagccctcgctagacatccccacatcaattatcgcctggtcgccggacgccccacgtcggtactcatttgaatgccagtgctcatcgccggagctccttagtccgccagacgtcatcgccggagatcaccctctcttctcacaagggatggagcaccccgtgaacaca

SEQ ID NO: 193685 - DNA, 483 bp, Arabidopsis thaliana landsberg
atgctcctgctcctggcgtcgacgctcctgctcctagtgcaggtgcggtgaagtctctccaggtggctcgactgtcctatcaccgtgcggcgcagtggacgttcgcatgctgagagggcaagaaaggatcaccgacttacatgcagtgcatctaagatgggccatctacaaaagacatcgtaagtacaagagtgagaacagaactatatgactagcaagtaaaccaaaagccaagtgagataaaaattttgtaagatgagtatatagatagtaatataacatataattggtcaagatgaccaacttttgaagtgacaccaaaggtcaaggtgagaatagggtctatagtccttaaagtgacctttcgtctaggttagcggtcctacagtcagcaaggctttgataccacttatgtgcacacccgattttggaaggcaaatcgaatgtgatccatctatgtgtcaggatcagaaactcacgtaa

SEQ ID NO: 193686 - DNA, 63 bp, Arabidopsis thaliana landsberg
ccgacccgagccgcgactgtaatcgatctgttaaaccgatccgagcaaatctgcattaattaa

SEQ ID NO: 193687 - DNA, 76 bp, Arabidopsis thaliana landsberg
atggctttagaagaggaggaagagagtcaaaacgcaccattttgtgttcttgatggtcttttctgtgaggaagaga

SEQ ID NO: 193688 - DNA, 1807 bp, Arabidopsis thaliana landsberg
atggaggctttagcgatggcgggagtggattatcaagaatggggacttagtattgaggagtgggagcttcaagaatccgtagttccgctccatttgcttgctgatgattttaaagaagaagaacaagaagaagatcatcaagacaatgatgatgatgatagagttttagatggcttagcggttaaacaatctgtcactcgtgacattagagcttcggttgggaaatttattgagcaatctatgtcacatatgattgttcacctcaaacagcttaagttcttaacacttcttcttgagaactttttgtttacccatgttcttgattttcttttgtaatcgttttaagaagtcttttttttttgggtcaaccagtttaagaataagaggttttgttttcataaaaagagcgaattaattaacacaatgcaagtattttattttctcatcgcagaaaaatgtattgtaagtacttgtattcagttttgataaattatatagatctagcattatttgttctatcagaaagatcaaaattagtaccaaagaacaaaagaaatatcgaattggaatctgacatctctttcaataacttaagaaaaaaaaagatcaaagcaaactcgaattatcaaccatattatatactctgttatataattttacaaaaatatgttgactcttaaaattgggttctatttaagatgagggccaaattaggttttacttatcataaattacataaaacacacaaaaaatgtattcgtttttaataaaaaacaaattctaagaaagatatgtatcttaaattagtatggggagatcattaaactatcctaattacaagtatttggtgactatgttctgaatgatcacatacatatgttaatgtttgttatatgcattcatgtttatcgtttatgtaagagcgcaaaaggggaaagtcttgttttcacgttccatctttcaaatgaaaggataaaaacaaaaaaacattttgtatctttaaagttcacgagaatcttgatgttgttacggtttgaccaataaaaaaaaaaaaacaacttgacgttgttagttgttacgaagggtttctattatgaacacaccatgacgtttgcatccatacgtaatatcttacgcttatgaactggtaccattttacatttcaaatctcgtgtgccacattgaaatattaggttattgattggattcaaatttagctaacatagatctcgataattattaatcttatacttcaatttttttgttcgctacagtttggtacattgggtttgattaatttgcccatgcctagttctaaccaaaaagtttggatattttcggatggtttcaagggggtttcaagtattttggatattttcgattcgggtattttggatttttggatttttttttctgttggtttgattatgttcacgcgctggatgagaatagtcaaatctttttcttctcaacaaggcgttgttgctttatgacaaccggatcaagtctaacccagaaaataaaaacgattgggtttgggttttatttgaggcattattatattctgatgtggtatgtccgggaaaatactgtggcgttttccagaggaaactgtttggaaggaagtcaagggtttggaagatctgcagcagcgacactctaactctggtggtgacgtgcttcttttaatatcattaaactttgcgccttctctgctcagaggttggccatcttctgggaagcccggcggcctgatcacattttggagctttggtatgccgagctttctctgacccagacgccatag

SEQ ID NO: 193689 - DNA, 451 bp, Arabidopsis thaliana landsberg
atttaactcttctggtgttatttttgatcacgaaatagcagatcaaggtggagctactttgatggaaaacgatcagaatgatacgagtcaagacactggatcacctactagttctcaaacacaagtccataatcaaaataatactcaagtttcagaggagaatcattctgaatcagaagaagaagacttaagtgactatcagttagttagagatagagcaagaatagcggttaagtcaaacccaaagtataatgagtcaaacttggttggttttgccttcttcactgaagatggtgatcacttagaaccaaattcttaccaggcggctctaagagaccctgaatgggataaatggagaggagccatgaaagaagaaatgatgccaatgggaaagaatcacacatgggatcttgtggataaacttgagggtatcaagatcataggctgttga

SEQ ID NO: 193690 - DNA, 516 bp, Arabidopsis thaliana landsberg
atggtaattcttaatttaattcttgtgctaactttagaggttctagaaagtaagaaaaaaacagttgataaaagatacccgaataaattaattgtactatttataggtggttttacaaaatatagttggatttgtttttttttaaacgactttatagttttttttccctcagcgaaataaacaatgataaattatatgaaagaaattaaaatataatagtatcactatttgataaaatgacattataaagagcttttaaaacttttttaacaaaacggaaataaataaatcacagtggaaaatagcaataaggagattttgtatttacttcagctgactttaataaaataaaaatctctgtgggaaaaaaatttcttgaaacttcttcaatggcggaagaagagaagcgaacttcaccggaacctcctcttccttctccgccggaatcttcatcccaacccgaacatcccccaccggaaacgtctactcctccggctacattcgatcctagtcgaa

SEQ ID NO: 193691 - DNA, 204 bp, Arabidopsis thaliana landsberg
ggaactcgtgcttgacccgcaaagacgtgcctccttacatgatcccagttcagcccgctggcctcttaaccatcgtgagtcctgcttcgttacctccagccgaagcaccaagcccagttttcacagatgctgatgtcactgaaccaccattacctccagtctcagccagagccccaaccaccacccctggacctcaatcaacag

SEQ ID NO: 193692 - DNA, 406 bp, Arabidopsis thaliana landsberg
gtatttcttgcatatgttctctgacttacagtgcatcatctggcaggggtggtggtttcatatctcttgaaaacttgctgtactttgccaggaactttcaggtatacctatacactacatatacaaacatttcatgaaaagaatgagctgattttccttaataaatttcactttccatgcatcataaattatcgatcaatcagttattcatgaattcacctcttatagatcttgctgatccacttatgtcacttagtttaaacggcacatgtctatatgctgcagaaatccttccaggaccttctgaggaaacaggttggggatcggtctgtgtgggaatacccctttgctgtcgctggtatcaacttaacattcatgctcatccaaatgcttgaccttgaagcag

SEQ ID NO: 193693 - DNA, 173 bp, Arabidopsis thaliana landsberg
atggcgaaaacattgctgaaagcacgtctttccggtgaaaggatcttacgttgctggggaggaggaggaattgagacaaactcgccgggatccacagtgaaggaagtgaaagagaagatccagattcttctagaagagtatgtctctggtggagacctcagagaagctagtag

SEQ ID NO: 193694 - DNA, 402 bp, Arabidopsis thaliana landsberg
atgccggtcttgaaacagttcataagcttcatgaaaagcttcacgcccgacaaccggcaactggcgttgaaaaccgggcttggtctcgatcaggcacatcaggcctttgccacacagtcccgcttcgtcggctggatcaacacccgatcgttgaccgggtatctcgctgatcgcacgcatgcgctgtcgttcctctccccaatgacccaagcggcgaaagtcgggttcggctgggatttcatgacctggatggcggacctcgccagaaccaaggagttctcagaactccagccctggacgcgggacatgttaaagcgtcacggctggaccaaagaggattggaccgcccttcgcgatgatggaccggagacctacaagggcgtcctatgtctgacacgggcg

SEQ ID NO: 193695 - DNA, 831 bp, Arabidopsis thaliana landsberg
caacacaccaccacaaacacgagaagctgcgacgtaccttttcccgcaacctttctcgtcggcttggtttggcggactgaacgacgaagaggagggtttggtaacacagatctgtgaaggtttaatcccacggcttcattgttttacctttccggtgacttgggtagtgctacaacggttcacaaacgagattttaggtactgctacaatggtttgactcagactattttttgtttttgttggcagaaaaagagagatcacgctgagcagaagtggcaagtaaaaccgaagatggatgctccatttgaatccggtgatagttcggcaacagttgttgcagaagcagtaaacaaccaatttggcgggttaagtcttaaggaaagcaacactaatgcgccagtcttaccgagtcaaactacaagtaaccaccgtgttcaaaatctagtatggaaacctaagtcatatggaacagttagtggatcatcttcggcaacagaagttggtaaaacatcggctgtctcacagataggttcttctggagatacaaaagttggtctcaatctgagcaaaattttcggaggtaatttgttggaaaaattttcggtggacaaatcgacttattgtcatgctcagatcagagccactttctatccaaaatttgagaacgaaaagactgaccaagaggtatactctatggtgctctttctgtgattacttgtcatttgtagcccttattgctagtttgccttatttcatgttgcactatcttgattttggcagataagaacaagaatgattgagatggtatctaaaggatttgcaacactggag

SEQ ID NO: 193696 - DNA, 709 bp, Arabidopsis thaliana landsberg
atgaacccgaaaatatcagattttgggttggctcggatgtttcatggaaccgaatatcaggataaaactcgcagggttgtcggaactctgtaagaaccattcttcaataacatattaaactagattggtaagtcatatactaaaatgggtacaactatttgattttttgaacagaggttatatgtctcctgagtatgcatgggctggagtattctctgagaaatcagacatctacagcttcggagttctactgctagaaatcatcagcggagagaagatttcaaggttcagctatggtgaggaaggaaaagcacttcttgcatatgtaagtcagcctttatgttttcttgcactttccgattttgtaaaaggtttgttgctcttgtattgttaagatctgaaaccaatgcaggtatgggaatgttggtgtgaaacccgaggagttaatctcttggaccaagctcttgatgattcttctcatccagccgaagttggaaggtgtgtccagattggtttgctctgtgttcaacatcaacctgcagacagaccaaacacacttgagttgttgtctatgcttaccacaacatcagatcttcctctgccaaaacaacccacatttgcagtgcacacaagaaatgacgaaccaccgtctaatgatttgatgatcactgtcaatgagatgacagagtctgtgatcctaggacgttga

SEQ ID NO: 193697 - DNA, 127 bp, Arabidopsis thaliana landsberg
ccaacgacaatttgcaaataacctccagcctttctatttggcatttcatcgagcactgggagtgcgttcagcaaaaccagaagtttgcagccataaacccatcattatcaaacccgagacaatctga

SEQ ID NO: 193698 - DNA, 126 bp, Arabidopsis thaliana landsberg
atgttcgacgatccagattggggatttggtataatgtctacgatccttaaactggaggctaacgatataaaccgccatggaaaccaaggatgctcggattgtcggtacccggcaatccgatcccgg

SEQ ID NO: 193699 - DNA, 335 bp, Arabidopsis thaliana landsberg
aggacgatgtggactccgacgacgatgccctaccggcgggcggcagtagcagccgctacagtgtctggtcgcacctgccgctgccggtgcttcccgtcgacaagggcggcgccgcgattaactttctggaggacggcggggccatgcggtctgacgtcagcagcacctccgacatcagcttcgtagcgtggcagtgcgacctgcgcatgcagcgcgtgagcgggctgacggggcagctgcaggtgtgcgagccgcgcactggctgtagcagccccgacatccgcgccgtcacgccagctcccgcggccgcgcaggtctccgagctgggcgagtag

SEQ ID NO: 193700 - DNA, 2001 bp, Arabidopsis thaliana landsberg
atggtaaaagaaattatggaaaataagaaaatggggtcattgaatgtcaagagggtaacattttcagacgataaggcgcaatgaccccacacctcacatgaagctgcagtgccatttccaaaagagtgtgtggatatgaatttgaacaaagaaacattggtgatgaaattaaaaaaaaaaaggaaagattactacaaagtgaaaagtatgaaattatgaagactacccgatcttctttgcctccctttccgtatttggcatgcccctaaccactaccacgacctcttcccttcggaactttgtaaataaacattcactgtttttttttttgctttttaaatagctgttaattgtacaaattcatttacatggcttactgtttttcaaaaggagatactaaatagtatatagtactataattttgtccaccatgttctatgaaactcgtccaaacataaaaaggtttttatatcatcaaacgtacgactttcctttgttattttcttggattggacacaacgagattggtttggtcactgtccgatctagttattgatatatatatatatatatatctatatatttttaatataatgtagatgtagcccactaactttttataagctttcatttttctatactttcatttttctataatgtaaaaagatagatgaaaatgaaactactagattacaactttttaacaaaaaataaaaaactactagattacagctcttgattggttgataacttgatatcatatatcgtgtttgtagttgaagatgtaaagatttatcatcttgtatttgaattttgcacaatatataatgtgatgattctatgtttgtttgtaaacttatgtgcaaatgggcgataactaaacgttcgtaaaatagttacatgtactaattaatcgaagcacataaatattatatatatatatatatatatgtatatatatgaaacgattcattgattttaagtatttaatttattttttaagattttagttgtcttaacctcgtacgaagaagaaggatatatactatttaactcgtggagatgatgaggttcggatatttttccttaagaccacaagacactgacacgccgactgatcgataaaaaaagttaaggcctacaatacaaaagagtagcagattcccttacacgtgtttcatttatgatctgttaattaactccattgagcttcaatatctcattagccgaaaattaacttgacgttttccattgaactgtcgaaaaaatttgtagaaaaagtgaaatgtcccctatttaacttccaagtttaaaacctaaaattaattagttaccgttttgatgaataacgttgaaagaatcgtcaacatatcaaatgatgcagatacaacaagggacaaaaacatcaaaaaattgattaaaaataatcattcatatattagcaattaaactgtaagtaaatgattgcctatatatctgtgaatgaatacatatatatgtatcaaactgtaagtcaataatacatacatatatatatatatatatataggaaaatatctcatttttcaatcattttcagaggtacacatttttaaagacaattttacctaacccaacatcttactatatttaaccagctctgcgagagcttcaaaacaatgatgaattttctgccccttttcattgaccaaataaaagttcacaaatttgtaaaaccaatcagcattaatttcgcacgtaggttacttcgtccgattgtagatcaagtagacattttaaccaagcatattgaatcacggttcaatcaagatacatggttgcgagtataatatatcaatccttcaccgcattagaaaaccaaattttctatttaatttagggcgtgttcttttaatgaacgcagcgtcagcgacaacaaagaagaaaaacagatctgcggcgagaaaaaatacattgattagagaagaactgccgcagaagatgtacgatgatgaagattga

SEQ ID NO: 193701 - DNA, 94 bp, Arabidopsis thaliana landsberg
cactaagcggttgtcatcgtcggagttcttcattatcgttgatggagcccagatcgagagaaatcatgtctcaataagagattattcaacaagg

SEQ ID NO: 193702 - DNA, 311 bp, Arabidopsis thaliana landsberg
atgaacactgccgccgcaattaaagcagcgatttgcagaccgcaaagctattgttctctcctgaaaactgcgttttttcattctactcctgtcttagaacgcaaacgccgttcctcttcttcttcggacggtctcttcactacatgtgtgggttcatctagataatggatttctatcatttattaccaatctctagattttagagtgtgaatacatgttttgctttttttagggttttgactatttggcagaaatcaaatgctcagaagaagcagagaagcaagaaatttttgagggaacatcaagaagca

SEQ ID NO: 193703 - DNA, 105 bp, Arabidopsis thaliana landsberg
ctagagggatctgccattccatctgagaaaactcgaaagaagaaagccggagagaaggataaagctcaacaagcatcaggtgttttgattcacctgtcttcatag

SEQ ID NO: 193704 - DNA, 875 bp, Arabidopsis thaliana landsberg
gactaaccctgatcaagttgagatcatattggaggagccactcaaggctaaagctgtgatggaaaagactaaccctgatggtgctcaagagcttccttcatttggtctcgaacaggccccacttcatcaaaatcaaaagtctggtgcaaagagaaagagagaaggattggtgagaagcgaaagagaagttggaaacatcaacgagaatgaagaagttattattgttggtgacactaaagctacagaagatttatgttttgatggaggagagcagtctcagaagtctgtgtagaagtctgtgtatagcaagcggcaagctttcgttgcacagagcaacataaatggtgaagggtctttgggcaaggaagaagcaggagaagaaccagaaagagcaaagcaggtttaaactttcaatgactttgataagctgagcgaagaagtacactttgaagttggccagacctgggctctttatgatacagtggatgggatgcctagattgtatgctcagatcaaagaagtttttgtttctggttttaatgttactgtcacgtggcttgagcctgatccatatgacgaggaaccaatacagaggtatgaaaaagacttgcatgtttctgttggtaggtttaaacttggaaaagatgagactattaaagatcacacaaggttttctcacttggttcattgcaataaaggaagtagcgcgggtaaattctgtatatacccaagaataggagagacatgggctatcttcaagggtcgctacaaatctctcatgacgagctttgacatcaactggttagctgatcccggttctccctggaaatatcagtacgcatttgtcgaaatcgtgtcagaagatgctggatcaa

SEQ ID NO: 193705 - DNA, 962 bp, Arabidopsis thaliana landsberg
gggacaaaaatccacacaactatagatgaagcttttaccaaatggattacgaatattggtggcgaaaacatcaacaagccaaatgatggagaaactaaaatcgatattcatgaagatttgttgataactgagtgcaaagatcctattaaaactatagtggatgaagtttatggagaatcttttacagagtcctataatcctgatttttaccaagagagggctattttgtgtcatacaaatgacgttgcggatgagattaatgattatatgctttcacaattacaaggtaacgcgtttaatccttctcgctttccacctatatatagccattttaatattttatgcacatactaattactacgacttcatttattatcatatcaggtgaagagacaaaatgttacggcgctgacaccatttatccaacgcatgcaagcccaaatgacaaaatgttataccctctagaggttttgaatagcatcaaagtccccggattgcctgattttaagctgaggttaaaggttggtgctcctgtcatgttacttagggaccttgatcctagccgtggtttttttacggggacaagacttcaaattactcggctgtgtgggtttgtgcttgaggctatgattatagcaggtaataagcatggtaagaaaatctggatccctaggatagcttcatacccaacagaaacaaattttcctcttcaaatgcggcgtacgcaatatcctttgaaacttgcgttcgcgatgactatagatgaaagtcaagtgcatacactttccaaagttggtctatatctaccaagacaagtgttctctcatggacgacagatgtttgttgctatatccaaggtgaagtcaagagctggtttgaaagttcttataacagacaaagatgggaatcctcaggaagaagccaagaatgttgtgttcaaggagttgtttcagaacatttag

SEQ ID NO: 193706 - DNA, 166 bp, Arabidopsis thaliana landsberg
gatggcgggttgattctcggaaaaccgaggggttctttagcaattttaccacgcgaaggggtatcgggcctgctctgccgttagatcttaaatcaacgaccgagatcagatcccgcggatgcgcgacgagcgctgacaggtgggctcagggtgtcagcgacccgag

SEQ ID NO: 193707 - DNA, 122 bp, Arabidopsis thaliana landsberg
gtgttgtcgatgtaaactggcacaacttctctccacccaaacaacttgataatagcttttatagcatgcacttgagggagtcctcatatgtagctcggaagaagtatgcactgcggagagaa

SEQ ID NO: 193708 - DNA, 154 bp, Arabidopsis thaliana landsberg
agaaaatccatcattgttaaaacccctgataaaagggatctcgaatccttcgattaagctaccacccacacaaggtaataccaagatgatgaaattagaagcagaatacgagaaaagccctctcaacgcgtatccacccgttgacttaatttga

SEQ ID NO: 193709 - DNA, 423 bp, Arabidopsis thaliana landsberg
atggtgaaacagaagaagaaagcgcagaatcggagttcttctccaacatctgagtattcaccgatgaagactcgagctggttcttcatatccagttaccgatgacatcgttgaacctccgtctctcaaaattacggctaatcgcgatcgttttcaatcacattccgcagcgattgaatcatacgacaatgctcatagtccgttcttccttcactcatcagatcatctaggtctgaatattgtttctcatgttcttgatggaacgagttacaacaattggtctatagctatgcgaatgagtttagatgcaaagaataagttgagctttgttgatggatctcttcctaggcctgatgttagtgatcgtatgttcaggatctggagtagatgcaatagtatggttaaaacttggttattgaatgtg

SEQ ID NO: 193710 - DNA, 145 bp, Arabidopsis thaliana landsberg
accagtctacagtttgttctcagtagagattgaatcggtatatagaaaccgtatcaagaaaagctccagttacaccagctctaggatcgaagttgaggaacttcttcctcaacgctatggatattctgagcttaacccgtactaa

SEQ ID NO: 193711 - DNA, 104 bp, Arabidopsis thaliana landsberg
acgagagtcctcaaatccattttctctctctatctctctttatcccttcgtcttcttcctcggcgacaccacttgcaggcgctaactcgacgaagaaggaaaag

SEQ ID NO: 193712 - DNA, 170 bp, Arabidopsis thaliana landsberg
aaattggcatcgttgcggaagttgtggagaatacgatcaagaactcggttaaagatatgtacccgtacgccttgaagattatacctaactggtatgcttgtgaatcagacatcatcaaaaggttagatggtgtcatcacgtcctgggattctgcaaaaatttcagtataa

SEQ ID NO: 193713 - DNA, 132 bp, Arabidopsis thaliana landsberg
atatactgtcaagaggataagagggaaggagaaaaaggaaaccgaaagttgtatgacttttactattcaacaatatcatttctcttttggcatgtttttgtggacgaagcccaagttcaagaatacatttaa

SEQ ID NO: 193714 - DNA, 524 bp, Arabidopsis thaliana landsberg
agcttccaagttcgatcaagattctatcagcaataaattgtgaatcacttgagagaatatcttcatctttcgactgtccaaatgcgaaagtcgagttcagcaaatccatgaatttcgatggagaagcacgacgagtaatcacgcagcaatgggtttacaagagagcatgcttacctggcaaagaggttcctctggagttcagtcaccgtgccagaggaggttccttgaccatccatctagaagatgaaaatgtttgttcttcatctttaagatttaaggcttgcatcctacttttcccaagcgaaaggaacaatatttgtactgtatattgtcgtctcataggtgaaagtggtcgtctcatcgcagcacatagatttggtggagttgtcaaggactttgtcacaccgcatctgtttatatttaactcagtcttacttgaagaagtggatgtgatacggtttgaattcagcagcatacaccacgagattacggaatgtggtgtacaaatattgacagatgcataa

SEQ ID NO: 193715 - DNA, 1401 bp, Arabidopsis thaliana landsberg
atgaggaatgcagagctcatcttcatcccaacaccaactgttggtcatcttgttccgtttcttgaatttgctaggcgtctcattgagcaggatgatagaatccgtatcaccttcctcttgatgaagcaacaaggtcagtctcatctggattcctatgttaagacaatttcctcgtctctgccgcttgttagatttattgatgtccctgagttagaggagaaaccaacacttggtacacagtttgtggaagcctatgtgtacgattttattgaaagaaatgcccctcttgcgctaaatataatcatgggtatcctatcttctcctgcatttgatggagttacggtcaagggattcgttgctgattttttctgtctcccgatgattgatgttgcaaaagatgcaagtcttcctttttatgtgttcttgacttcaaattccggattcctagctatgatgcagtatctggcatatggacataagaaagatacctcagtttttgcaagaaactctgaagaaatgttgtcaattcctggatttgtaaaccctgtcccagccaaagtactgccgtcagctctgtttattgaggatggttatgatgctgacgctaaactggctatattgtttacaaaggctaatggaatcctagtgaatacctcctttgatattgagcctacctctctgaatcattttcttggagaagacaattacccttctgtttatgctgttggccccatatttaacccgaaggcccatcctcatccagatcaagacctcgtctgttgtgacgagtcgatgaaatggcttgatgctcaacccgaggcatcagttgtattcctttgttttgggagtatgggtagcttaagaggtcctctagtgaaggaaatagcacatggacttgagctatgtcagtatagattcctctggtcactccgcacagaagaagtgacaaatgatgatcttttgccagagggattcatggaccgtgtcagtggacggggaatgatatcggttggtctcctcaggtggaaatacggcccataaacagtgggaggttttgtttctcattgtggatggaactcaatagtagagagtttatggtttggtgtgccaattgtgacatggccaatgtatgcagagcaacagctcaatgcgtttctgatggtgaaggaactgaagctcgcagtggagctgaaactcgattatagtgtacatagtggtgagattgtaagtgcaaacgagatagagacagcgatttcttgtgtaatgaacaaggataataatgttgtgaggaaacgagtgatggatatctcgcagatgatccagagagctacgaagaatggtggatcttcgtttgccgcaattgagaaattcatacatgacgtgataggaaccaggacttag

SEQ ID NO: 193716 - DNA, 430 bp, Arabidopsis thaliana landsberg
atgccagtcaccttcggaactccggagaactacagaaccgagttcctgaggttcgaggtggcgaacttcgactgcgggtacaacaccatcatttgggaggtcggggctggctaagttcatggccattccacactatacatacatgatactgaagatgccaggaccgcaaggaatcataactgtgcgcgccgacttccaaggcaccgcagaatgtttccgagtggccatccaagcagccctcaccaccaagccgtcaacggttccttcaacactggcgaactctaagcctgaggaggaccttgcagtaccagcgaacgaagctcaggccgcgacctctatgcggccgactgaagaaaccaagaggatcaatctggggttcgctgatgaacgcaagactgctgtcatcagctccagcttggacgacaaatag

SEQ ID NO: 193717 - DNA, 188 bp, Arabidopsis thaliana landsberg
gatcgatgatcgcatcactgaaagaagatgaagaaaaacaagtaagcaccgacggaaaggaccgaacacttttgcaccaagaagatacatgttacaagacaaagagaccaacactgagatatcctgacttctccacgtgcatcatagctaggcgctgtgctataccagtataccacttagcactttaa

SEQ ID NO: 193718 - DNA, 49 bp, Arabidopsis thaliana landsberg
atgtacaccaccgtcaatggctctcaactaataccagtaatgacaaaac

SEQ ID NO: 193719 - DNA, 169 bp, Arabidopsis thaliana landsberg
atggcagaagaagaaaagaaggtggataagaagaatgatgagtaagttccggttaccgtttcttcggccatttcgccggaaaaatagaacgtggagatacagacattttgatccagatgaagaagaaggagatgcaaggagcaaagctaaacacaactcagatatttgg

SEQ ID NO: 193720 - DNA, 444 bp, Arabidopsis thaliana landsberg
atgggtggtccgcttgttgcgtctaacaacgatacgttaacgagaacttgggtgcctgactcggagtttctgcttgagaagaatttagctaagagtatgtctaagttctcaactgttaactttgttccaggttatgcaacagaggactctgctccaagaactgtctatggtagttgtactgagatgaattccgctgataacccgaatagcattttcaatgtgacttgggagttcgatgttgacccgggttttcagtactatttccgctttcatttctgcgatatcgttagcttgtcgttaaaccagctatatttcaatctttatgttgactcaatggttgctgctacggatattgatcttagcactcttgtggataacactttggctggtgcatattcgatggactttgtcacgcagacgccaaagggtagtaataaagtccgt

SEQ ID NO: 193721 - DNA, 112 bp, Arabidopsis thaliana landsberg
cattggagatattatgtcggcaagtgcagcaatcaaacaacagatcatccaaattgaagaagaaatcaaatcaatagccaaaaatatcaatcctgagaaaatttcccgataa

SEQ ID NO: 193722 - DNA, 523 bp, Arabidopsis thaliana landsberg
atgcttgagaaaatgggagcaactgtaactgcagtctgggatggacaacaagcagttgattccctcaactacaagtctatcaatgctcaagctccaactgaagaacacaaatcgttcgaagaagaaaccgctaacaaagttacaactcgggagactagtttactgaattcctcgccttatgacttgatcctcatggactgccaggtacaattacttttttcatttttgatttcaattccacatgtaaagaagacatgacaatttattaaacattttctcatggtagatgccaaaaatggatggatatgaggcaacaaaggcgataaggagagcagagattggcacagagctgcacattccaatcgtggcgttgacagcgcatgcaatgtcttctgatgaagcgaaatgcttggaggttggaatggatgcttatctcacaaagcctattgatcgaaagcttatggtctctaccattttgtcactcactaaaccatcagcattccaaacttcattgtccgcttga

SEQ ID NO: 193723 - DNA, 1452 bp, Arabidopsis thaliana landsberg
  unsure (1)..(1452): unsure at all n locations
gtttcaagaaatcgtgccgttaaatgccggtaacgtacttggagccgaggataatggccctgcggctaagtggttgtctcttatccgagaagccttgaacaacaccaacaatttatcgccaaatgagctcgagcatacgaaatcatcacaacagccccgtttcagcttctcaggcctctcagatgataccccaatcccatgcaattcaactcctcctcgcggctatagccttgcggcgagtaaacagatggtggggatatttttgtgtgtgtgggttagagatgatctccggaaacgtataaccaacctcaaggtttcatgtgttggccgtggtatcatgggatatcttggaaacaaggttagtctaagtttcaacaaaactgattctaagaaattttgataatctgtaagcttggtatagctaacgatgtacaaccttgtgtagggctcggtttcgatcagcatgtcgttgcataagacaagtctatgtttcgtntgtacgcatctacgttctggagaaaaagaaggcgacgagcttagaagaaacttagatgtgaccgaaatatttaagaggacaagattttcacgttcttctaaagattctcgaccggagacaataatggaccatgagtaagtctatgaaaaattaatgttcgaatactaggtttttagtaaggtaaacattttctaatcgtttaaatacatggttgtgttacagtaaagtaatatggctcggagatttgaattatcggctaagggcgagcagtgacttgcatgaacagcttagaaaccatgattgggaatcacttctagagaaagatcaggttaatataatttataatttaaaattgattggttcttctgtcacgattgcttatataagagtagttaaactaaaacatgaatctttcttttttctatttcagcttaagatagaacaaagagctggtagaatttttaagggatgggaagaagggaagatttatttcgcaccaacctataaatatcgaataaactctgataattacgttgtccaaaccgaataatcaaaggaaaaacgaagaactccggcttggtaagataattaacatgctctaaatattttataatgatgatgatcttaaacgttgtgtttctaatgttgttttcaaaatcatttatttcaggtgtgatcggatattgtggaaaggtgacggaatgaaacaactttggtacgtgaggggagagtcgaaattctcggaccacagaccggttcaatctctattttcggtacatattgacttgaagaatcaatcgaaccggaaaactaaaccggttaaccaaaatcatcgtccaaacccggtattgacttatacgtgccacgggaaagttcaagctgaagagatcttgttgctcacacgtgcacagagttgtatagatacactacctagacttatttcgtccgcttcctaa

SEQ ID NO: 193724 - DNA, 510 bp, Arabidopsis thaliana landsberg
ttactgcttaaattcaggtttgctgaaacctcggggctcaatatgcatgtcaacgtggaacttgggaaagtgaaaagatatgaggtaagacatgtaacaaattctcggatgttttcatccttttgccattaaattgaacaatgtctcgttcatgctcaaggaggctcaattaatgaactgaactaacctagagccacgtgttttccttctgccttttctgattcaaaaagttgactaaggataatgacatacgggtagttaattatagtgtatcacacatcttataagttgtaatattgtctacttcaaacattaattagccaccaagtataaaccgggaagtttctagggatgtatttaatttggctcgatgggctttgtgtaaaaaaaaatccagtcgctattaagtatgagatatctccaccgttctagtcgaattcgtctattatgtataagtttgccatatacggccgacaacttttgctcatggatattaaagatactttataa

SEQ ID NO: 193725 - DNA, 1457 bp, Arabidopsis thaliana landsberg
atggtccttaatcgacttagacggagacactacaccgagactcctttctcgtgcaagtcacccgaccggtctcagcttaatcatttcaaacccaaaatttggtacctgccagaggtacatcttttccgatattgaacccatcatggccatgatggattcaccatcaagtcttttcttttgaaaacttcccatcccatatgatcagcatcatcttttgtttaaaaaaccttttgttttctaaggcaagactaagcattagaaaacttttgagtaaaacaggtatcaaggaatggtaaacagttctaaggaaggaaatgcagcaattgtttagcactcaactcctatcacctaatgcatcatctcaagtgataaagagtttaaaatcacaaggaaaggggtaaatgcaccgaggcttgccttcgtttataggtgagtcaggctcgaatccgcagatgtcaaagtaaaagcaattccctgcctgatgttccgtaggtggtggcggtgaagtcttctcctcttcaacctcaccctcttgttcgttttctagatatacttgtgtatatatatataagaatgaatgccatgtaatgcttatgagagtgcaaagataataaagatttattaactaagtcttgaatacaactttccttcacggaactccgagaacttagggtttccggagtcggtaaaggagttcaaagggcaggggggttttgggttctagttatcaaacaaagtccaaatcagcccaaattctacccaaggcttctaaataataaaaggagctcatacaaaaattttgagcatttttgggattattacttatcttctaaaaatccagaagcaaggtcttgagctgttttaaatactctataatttcctttttggattaaaaatcataaaactatttttattaaattctagggaaaataaggaatctaggaaaattggtcttgcatttttaggatttttctacaatttttaacatatttctaaagctctgttgaaaaagaaaaaaggaaaaggcttcaacagtaatgggctggcttctagcccagacggcccaagtccaggggcataagcgcccgcgcgcacctggcggctttgcaaaaagggccccgagtttatgactatctgtgaacgagttccttcactgttcctgtgtgtcgctgaccgatcacaaaaaggcccctgtgtttctttctattcccgattggaagtccacgagcggcgctccgcagccgccgcgctccggcgagcatctacgccggtcgattggggcagtgaccggcgctcccgagcggtggacaccaaatcggagctaacgtgcgcatttcccctaacctaattgtacgaatgaccaactacagagctctggccacggtgaccgagagcaatgcggacggatgagtgcgttcccgttgattcatggcggtctaattcgatttaacgggtcg

SEQ ID NO: 193726 - DNA, 141 bp, Arabidopsis thaliana landsberg
atttagcatcttgggacttattggactttcctcaaactcaaagagctctgcctcgtgtcatgactgttcctggtatcatctctgagttggatggaggctacagtgatggatcctctgatgttaattcctcaaacagctccc

SEQ ID NO: 193727 - DNA, 132 bp, Arabidopsis thaliana landsberg
tgaaaattcctatggccccacttgcgttcggagtttaaagttgctgcttttatcaccatccgacatccgtcttcaagatcctttctacgtgcaacaacatcaaactcttgagttcttgcttgaccaaaaaaa

SEQ ID NO: 193728 - DNA, 2988 bp, Arabidopsis thaliana landsberg
atggcgggaaactacaattatggcggtactggcggtttctatcgagattggatgtacaagagatttgatgaagtgacggggaatttgtcagccgaatacgttgcaggagttgagcaattcatgacattcgctaataatcagccaatagtacagagtagtcgaggtaaatttcattgtccttgtagtgtatgcaagaatgaaaaacacatcatctcgggtagaagagttagtagtcatttgtttagtcatggatttatgcctgattattatgtttgatataagcatggagaagaaatgaatatggatataggaacgagttacacgaataggacgtattttagtgagaatcatgaagaagtgggtaatattgtagaagatccatatgtggatatggtgaacgatgcatttaattttaacgtggggtatgatgataactatcgtcatgatgatagttatcagaatgtggaagaaccggtccgtaaccattcaaataagttctacgacttgttagaaggtgcaaataatcctttgtacgatggttgtcgtgaaggacagtcgcaattatccttagcatctcgactcatgcacaacaaggcggagtataatatgagtgaaaagttggtggactccgtttgcgaaatgtttacagattttttaccagaaggaaaccaggcaaccacttcacattaccagactgagaagttaatgcgcaatttaggacttccatatcatacgattgatgtttgtcagaacaattgtatgctattttggaaagaagacgaaaaagaagatcaatgtcgattttgtggcatgaaaagatggaagcctaaggacgaccgtcgaagaaccaaagtaccatatagtcgtatgtggtatctacctattggggaccggttgaagagaatgtatcagagccataagacagctgcggcaatgcgatggcatgctgagcaccaatcaaaggagggagaaatgaatcatccttcagatgcagcagagtggagatatttccaagggttacatcccgagtttgccgaagaaccccgtaacgtttatctcgggttgtgtactgatgggttcaatccatttggcatgtctcgtaatcattcgttgtggcctgtgatcctaactccttataatttaccccctggtatgtgcatgaataccgagtacttatttcttaccattctgaattctggtccaaatcatcctcgagctagtcttgatgtcttcctccaacctcttattgaggagttaaaagagttgtggtctactggagtcgatgcgtacgatgtttcattgagtcagaattttaatctaaaagcagtactactgtggacgattagcgactttccggcgtatagcatgttatcaggatggactactcatggtaaattgtcttgtcctgtttgcatggaaagtacaaagtctttttatctacccaatggacggaagacatgctggtttgattgtcaccgtagatttcttcctcatggtcatccatcccataggaacagaaaagactttctaaaaggaatagatgcttctagcgagtatccacccgagtctttgacaggggagcaagtttattacgagcggttggctagtgtaaatccagcaaaaacgaaggacgttggtgggaacggtcatgaaaagaagatgccaggctatggaaaggaacataattggcacaaggaaagcatcttgtgggagttgtcttactggaaggacctcaatcttcgacataatattgatgtgatgcatacagagaagaattttcttgacaacatcatgaacactctcatgagtgttaagggtaaatcaaaagataatatcatgtcaagattggatattaaaaatttttgttctcggtcagacttacatattgatagtcagggtaaagctccatttccagcgtatgcattaaccgaagaagccaaaaagagtttattatcatgtgtgaaacatgaggtaaaattcccagatggttattcttcagatttggctacttgtttagacatggagaatggaaagttttcaggcatgaagagtcatgattgtcatgtttttatggagcgactactgccatttatctttgctgaactccttgaccggaatgtccaccttgcattatcaggtacaatatatgttttttaatttgccacacttttttaaacctctgatttaacttaaacacatatatatatattttagggattggagcattttttcgggacttatgttcgagaactttacagaaaactcgggttcaaattctcaaacagaacatagttttaataatctgtaacttggaaaagatcttttcaccatcattttttgatgttatggaacatctacctatccatctcccatacgaagctgaattgggtggccctgtccaatatcggtggatgtacccatttgagaggtttttcaaaaagttgaaaggaaaagcaaagaacaaaagatatgcggcaggatcaattgttgagtcatatatcaataacgagattgcatattttccagagcactactttgccgatcatatacaaacaaaatcaaggtaaatataactatttattttacgattcgccatctatacttcagaattaaaatcaattacatggatcaggttaacaagattcgatgaaggaaaagttcatgtatatcatgtccctagagtacctaacatatttatgcacgtcggccgtccaagtggtgaaatgcacgtggaatggctttcagagaaagactaccaaagcgcacatgcatatgttttaagaaattgtgactattttcaaccacttgagaggtatttttaatcactccttaatttaaaatttccattatgataactttgatttatttatctttggttgtaaatatagtatgttcgaggattttctttctgtgaaatatccaaccccgtccgaaaaagaactctacgcgaaaagagcagaaaaatattatatatgggttacagaatat

SEQ ID NO: 193729 - DNA, 320 bp, Arabidopsis thaliana landsberg
atttttcaaaatgggttgaagaaaagcctaaagataaggataaagtctctcgctttgagagcctttcctttttctctgtcgaagctcagcgagatattcaccaagagttaaaggaaaagaactctttcgtcgggaaggtgttgtctaaaatcgagtacgaccctaccgagataaaagagctagaggatgccataaaaagcgtaaatgaaaatgcggttaataagagcaaggaacttaaaaatctaaaggcgcagctgaataagctcaaccaatcctttgatggacatggaaatactgaaataacgccatttcccaaaaaa

SEQ ID NO: 193730 - DNA, 684 bp, Arabidopsis thaliana landsberg
gtatatatttatcaaatcaaaacagctgcttaatctttcagcggtcaagtgaatttcttaaccaaagttttgctttgtttgctgtcacagttccccgtattgtaccaagaaggtgtacagaatctcctatttagttggcgccggatactaagctggatgttccatggcttctgcagcgcaataatcattttctttctgtgcaaaacctctcttgaatctcaagctttcaaccacgaagggaaaaccgcagggagagatattctagggggaacgatgtacacatgtgtggtgtgggttgtgagtttgcagatggtcttgacgatcagttacttcacattgatccaacatgttgtcgtttggggatccgttgttatatggtaccttttcctgatggtgtacggatcccttccaataagaatgtctacagatgcctatatggtcttccttgaagctcttgcacctgcgccttcgtactggatcaccactctctttgtagtgctatcgacaatgatgccttacttcatcttctctgctattcagatgaggtttttcccaatgtcacatggaaccgtacagctgcttagatacgaggatcagtgcagcaactctgggaactttgaaatggggaggcagggatcagtgaggcctacactggccatgagatctcatcagccagaatcttga

SEQ ID NO: 193731 - DNA, 111 bp, Arabidopsis thaliana landsberg
tttctgactactaaatggaccgctataaggcccataaccaaatttcaaagagaattagagagttcatcacggcccaagatgaatatacccaagtctaagtttgaagtttga

SEQ ID NO: 193732 - DNA, 60 bp, Arabidopsis thaliana landsberg
atgtccatcaaacgcatcgagaaagagaagaatgtgttgtctgtcgtggatctaataaag

SEQ ID NO: 193733 - DNA, 362 bp, Arabidopsis thaliana landsberg
  unsure (1)..(362): unsure at all n locations
atgctcatgcgcagtgcgcgctgtggctgccatttgcaggcttttcatcgaaagattgttacggccccgttgttttgcgtctaccgactaacaaaccactccaaactcccggtgtatgtgcatattgcacgagaggtcgtggtgccacgatagtatgcgctgagccgcactgcaaaacagcgtttcacgtcccatgtggccaaaaaagatgcgtgcccgtggtgaaggattnnnnnnnnnnnnnnnnnnnnnggtgtcaggagcatatccccgaagagcatcgaagagggtgtaaagaggctatgaagacactgatgcgagagagacagacgcgtagacgcaagaagaaattggcagagact

SEQ ID NO: 193734 - DNA, 558 bp, Arabidopsis thaliana landsberg
atggtactgtttcctcttcaccatgaagtcccttgtaaaggagaagtattgtttgattcaaatggtttaagacgtttttcgtctggtctgaaacatagaacaatggctgaagcaaccacgcttggcagggattgtaggatgaagagttatatgaaatcaatcccgtattgtcgttcaccaagaagaaggttatgtttagttagagcgtcatcagagaacaagattaccaaacagagacttaaactgttggattcttactttgggaaacttcaaaacgatgatgagaagccttctatctcaacaggagatgatattgatcgcaaagctgaactcaatgtgaatgaagagttggattctttgagtgcttatcttgacaaactccaaaaaggtattcttgtttttggtgtcttgttgcttgatttttctggctttttcctcttgttaatgttcacttattttgctgtttgtcagatgcaaaatctaaaggtttagtctcgtccaccttggacgtggtaaaatcagaaggcggttcagtagcaagcaaattgagaaagactg

SEQ ID NO: 193735 - DNA, 147 bp, Arabidopsis thaliana landsberg
cactcgatcaaacggaccagaatgcaagaaatcactcgatcaaacggtggtgatgattctctcatttggtcattcaaatcaacgcctcaaaacactcctcctcattctactcgatcaacgtttgagatctttcttgacttggtttga

SEQ ID NO: 193736 - DNA, 376 bp, Arabidopsis thaliana landsberg
atgttggatctagtagctacactggaagctctgtaccgagccaccagccagatggataagctggaacgagtagccacctccaagacatcttcaatatccgtggtgcccgtgcaatatcctccacccaggagatcgagcgggtcattaagtttgcccgtgagattaagaatgcaggaaatgaagctcgactagctgccatgacaatggacagtgatttgggtggtgctactcgtcgagctaccggtgcccttgacgatcttggaaagacaatcggcttcatcgtcaatgtccctctacagggcctactagaagctgttccggcagtggctggtagaatagacatgctagcccgaaaattcccaatgatgacagccgg

SEQ ID NO: 193737 - DNA, 1541 bp, Arabidopsis thaliana landsberg
atgaccaaacaaacaagacacgtgaccgccaacattgtcctaaaatcccaccgtacactgaaacgtcacgccgacgcgactcctgaacacgcttccttcgcaacaacacatgtcagtgctcattagttggcgcgatcaccggttcgagccaatgctaatatctgctgattcacaagggtataatcgtctgtacttcattaaattgtcatttctatactcttcggccttttggcaaatcacattgaatttgaagcaattttccttccgacaatctctaaattcttacctaattagtacttttggagactaatgttctgctcgagattcgaaactaggaaactaataaaaatcggacctgttacttaccaaaactacaaaataaaaatcgcacctttagaaatcgccttgtcacaaatttgatttcttgccgatttgtcatcatcttcttcagatttcttcaaatgccgaagaaagtagtgattccgtctccggcgatgagtcctctacatcaatggagattaagtgcgctaacatctctcgtcttcttcctcatagttgttgtctggagcattgacagttgttcaatcagaagcttcatcaaatcatggagattcaactcttactctatacgactcacttctcctccttctctggatctggatccgacccgagtaaagcttgcctggatctccgtcgagcaagagcagaacttcacagcgaatgtactcaaaaactggttagctccgggtggagagaagtgcagagaagcaaacaccgttgagatttctgttccgggaatcgaagggaagggtttagtagagttaacggctggtgagattcacgaattcagatttcattctctagatgattctggggaacgagtttgtatcggtggagattacttcgagactgatctttccggtgaaaactggaaatcaagaccaccggtgaaagatttaggaaacggaacttactctttatctcttcagattcatcctgatttcgccggagattatgatctcaccgttgttttactcttccgtcgcttccaaggtcttaaacttagccctgcacgcttcgcattcaacagaacgctacgaaatttcaaactacggtttatcaagaaacctcacgttgttttaccggagctccggagatgtgaattgtccgatttcgacagagatgtttggtctggccggtggattaggcttggtaagaacgacgagtgtgaaatcagcaatgatggacgttaccgttgcttaccagatggttaccgttgccgggaaccatggtgcgacggagctttatcggcgttagaaagcaatggttgggtttactcgagtcattgctcgtttaagctattctctagtgaatcagcttgggattgtttgaagaacaaatggattttcttctggggtgactctaatcatgttgattcgatcagaaacttgttgaactttgtcttgggtcatccggagattggtgctgttcctagcccgtttgatttgaagttctcgaatccgaagaactcatcggaaaca

SEQ ID NO: 193738 - DNA, 52 bp, Arabidopsis thaliana landsberg
atggagacgtctagtagacgcagtctcagtgacgacaaaattgacaacgacg

SEQ ID NO: 193739 - DNA, 58 bp, Arabidopsis thaliana landsberg
atggtggcttgtacggtgactttgtctccaaggcactcgattgcatcccacacagcag

SEQ ID NO: 193740 - DNA, 601 bp, Arabidopsis thaliana landsberg
ctgttcttcttgatgatggattcattcagtcctatgctgataatacgctattcgtcaaagctggtacgtctattgttgctctacttgtttatgtagatgacattttgatagtgagcaatgatgatgaggctgtgagatccgttaaagctgttctagggaaacactttaaaaccaaggatttaggtgaggcaaaattcttcttaggacttgagattgctagaaatgcagatggtatttcagttagtcaaaggaagtattgtttggatatgctagctgattcagggctgtttggatcctaaagttcctttaacaaaggaaacatgtactcttttggacaatgcaagaccctatcgagagataattgaaaggttgctgtatttgtgtattactcgacctgatattacttatgcagggaaccgattaagccaatttctatcatgccctactgatgttcatcttcaagcagcttatcaaatcctgaagtacctgaagaacaatccgggtcaggggttattctattctgctcaaccaggaatatgcttgaatggttttgctgatgcagattggagtacttgccttgatacaagacgatctacttcta

SEQ ID NO: 193741 - DNA, 901 bp, Arabidopsis thaliana landsberg
aaagaaagtagaagcaaagcttgaagcttttggatttctaatgtgtgtgaatcgtgatgttgtcatcaggacagatgatgggccatgtcgtggccgaactcagatgatcttgtctcgaagtaacttcgccgattgtatacggtgtcagggcgtgagagtttcaaaaaccctaaaaatggggacaaagcgacccacttgcccttcttgcgataaacctagccagctctgtctctgcaagaagatgagatctccatgttttgataatcaggtgagtattactattcttcagcatagtctcgagagaaaacacgcgctaaattctactcgaatcgctagattagggcttaagaatgttggtgtgactactgttttcgatgttcatgatgaggcagagttcttaatcagggttattggatcgggttgcagcaagattgacacgaatcatttggattctgagtatagggtagagaatgttgcttctttggaacttgatgatagctttaagttaggtagtagtggcaatgtggagaacttagaatctgagaagaatgtggtgcttgttgatcatggaagcttggaaattgctgaaagtttgaatctttctcaacatttgagtgaaatttcttatcgggattcgcgggttagggataagataggttcttatgaagaagatttgatacaaatctgtatgaagaaacatggtgtcatcagcaatgtctcacactctttgatgcttgaaaccaatgtgaaggttcctagttttgatcatatattggcttctcctgcagccatggatgtcttggcaaaaggttttatggtaacaaagttttcagaaggaaagcaagagtttgagctcgaggttcctcctggatcagataagttgttcccgagcgaagaatcg

SEQ ID NO: 193742 - DNA, 120 bp, Arabidopsis thaliana landsberg
aaaagtttatcaaagtaactacagttggatttggagttagggtttatgtctatgtaatagcttcccacaaaattttgttacgcgatttcaaagctgatgcctgtgcgactgtgtctgagg

SEQ ID NO: 193743 - DNA, 117 bp, Arabidopsis thaliana landsberg
atgggtgggtcagatggctacaacgggccaatcagagacatacaggaggactggaaggaatgcctccctacacaatacgcagtggacattgtgcacctagagcccattccggtcatg

SEQ ID NO: 193744 - DNA, 159 bp, Arabidopsis thaliana landsberg
taaattcagaacctccttccttagtaagagtaattgccccatatggcagtacctctttgatggtgaaaggcccagaccacctggattttagctttgctggaaacaactggagtctggagttgacaagcagaactgggtctccaatgttgaaatcttttg

SEQ ID NO: 193745 - DNA, 355 bp, Arabidopsis thaliana landsberg
atgtggatcttcaatgccgtcaagatagaccaagatggacttcgattgagtttcgagatcttcaaaagaaagctcgggttttccttcgaccatcagaatcgcgccctggtgagtcgcgcagacgcggtccatagccgcggccggcttgatctcaatcttgccatggaaacgttggacttggccatgaagctctttgagctcttgcgaatgctcgaaatcctgaggaagccacagcaggcgaaccccttggggtcgcgtgcgcagagcttctcggatcgcgtggaagcccggaatcattcgccaggcctttggaatttcgggatcgcgggtacggacactccccgggccacgggcg

SEQ ID NO: 193746 - DNA, 828 bp, Arabidopsis thaliana landsberg
atgacacgagctttgaataatattgtggtaaaagaagtaagggacatacatgacggttacgaggagcgattggagcaggaagcgagaatcttccccttgcaacaacagcatggaaagcccacagtggtagacacacaaccctgcatacccaaattagcggcgcatatacacttgttatgtattaacccattgcatatatgattgctaccaacaccaagaagaaatgaataaccaagtaaaaacacctccacaaccaagaatcaaagaatctgaaaccctataaaagaatattcccaagatgatgacatcatctccaattgcagtcctcacacaaaaccctatgtttattcatacagacatagtacttggtacatcaacacgtgacacaatctagcatggcttccctgtctaatagctgatagagatgtacttttaatgtcttctacacaagaagtaccaaaaacggcaatttccaattcttattaagtaaaaattaccatcgtggattccattatctaaaggagaatcgatagagttttcgatcaagggaagctaaatttcaacaatctcacataaaattcgttccgacagatgccacatacaagcaaaacgtcacagtttccgacaaaaccaagctcagaattataaaatcaacgaataaggtctgaacccaaatcctcaactctctcaatcttgtaggacgcaataatgatgcgctcgaaattcaacgaacaagaaaaaaaaaacttcgatttcatacaatttgagtctcagagaaaaggagagacaaaaaagagaggagagaaactaaccaccaggagtaagtaa

SEQ ID NO: 193747 - DNA, 394 bp, Arabidopsis thaliana landsberg
gtgcgctcggtgagttgggacgaggcaggcaatcgtcaggtcgaacctggcggcacgcgtgacagcggtgccagcaatcgtcgcgtcgccctggtgatcgacttcgccggtgccagtgcggacgcgggcgccagcgccggctgaaacaagccggcagcgttcgttgcggcatgacgaaaccaggcactcccatcacctttccgcgaccctcacgatgtgagggtacggaaaggaggtggtcgcgatgatccgcaaactgaaatcgggcgagtatcgaatctattcgcgcaagaagaatcccgacaccggcaaacgccgcaacctcgggacattcaagacgcgcgaagcggcggaaaagcacgagcgcgaagtgcagtatttcaagcggcattga

SEQ ID NO: 193748 - DNA, 1058 bp, Arabidopsis thaliana landsberg
aatagaaatgctcccaacctttatcaactaaacctccatggttacacgcagtgagaaccaccaaaaaagtaaccggatttggtctacaaccttcttccttcatcttttcaaagcattttaacacctctgaaacttttccatgatatccatagccagacatcaatgaggtccacgtaatcacatttctagtggacaattgatcaaatactctgtggccatcagagaagctactgcatttaaagtacatatcaacaagagcactatcaactataatgttcgacttaatacaccgctttatcatcacagcgtgagctctctttgcatgtaccaacgatgctaacgcagaacaagctctaaacactgaagcaaatgtatactgatcaggaactattctgatctgtgtcatatcataacaaataaaaagcccttcttgctctaaaccttttgcacatacccagatatcattgcattccacggtatcaaatctctaatcttcaaactacgaaagaatcctccagctgtttgaagatcacctgataaggcgtaaagtatcaacaacttaactttcaaatactcattgagagcaaatccaacaacaaccatctgagcatgtatacgtttcccttttgtatactccttcctttgtttacattcctgcaacagtacagcataagtctcaggctctacttgcaatccgctactccataacaacccaacagcttctttcaatctccctgtaacacatagaccctttaatgtcttatctagcttctctgttttcctctgattctccacctgaaacctagaaccaaattttgatcactcaatggaaaaagcttcagactttacaatctcatagagatgatcatagcagaattataaaaggttcagcctttatacgtgatacaagaacaaagataaagattccaattttagacgaataaacccaaaatcagggaaatgaatttcgaaaccttccaattctcttctctgcaagcatccggcgtaggatcgtcgtcgcattgccggagaacatagaactagaagcggacgtctga

SEQ ID NO: 193749 - DNA, 347 bp, Arabidopsis thaliana landsberg
atgtcgtcattggagtcgcccgaactgcgccggatcggaggatgtcatgtgcgatcgtcgctgcgcgcaccttgcaccttccgtgacgtcgctcgaacctcatgccttgtgtgtcgttgtcgctactcgcacatcgaggggcaccgcttgctcgccggccgtggaagtgccaccgcctcggggcccctggaacgctgccgcttgcccgcacaagggcaccgtcgtcgctcgccctctagatcggggagccgttaccgccgacctgggaacgtcgcgtctactccggatcgaggaatcgcgccacgcacgtcgaggtcggggagcgcggcactggcgtgggtcaccgg

SEQ ID NO: 193750 - DNA, 1255 bp, Arabidopsis thaliana landsberg
atgtctgaggagaagaagatatccgtggaggagaagctatatgaggagaagaaggttgcatatccttttattgctggattttacgaatccatggccaaaactaatacagagataatcacaaaggagatattggcagatttatctgaagattctaatgacagtgatgaatttgatgtggaaagcggagatgaagattctgaggatcggccctggcgaccaagccataccatcttcggaaagtcaactattaagcaaagtcatgttgatgctataagggaaagatacttttgtgacatgactattgtgagggttggaggagatagcaccgcccctgctcctgaagaaaatgaggtggttatttacaaaagctttttgaaggcgggtcttcggttcccgctgagcaagtttgtggttgaagtgctgaagatataccagatcttccttcatcagatcacccccgaagctattattaggatggggatttttgtctaggctgtaaggagtcaagggctggagccaagcacgaagctttcctgcagcatgcacgagcttttgtatgagacgaaggctactggcaaagaacagtaccataacaacttcggttgttatggatttattgctcgccccaatgcaagccacccagtgccaacattccggaaaagatggcccggagcctggatggaggagtggttttacgttaaaaatgatttaaaggcaatggaagacatcaaagaaatcattatgcgccccatttggtcccgcttcggcctctgaaggccgaaggttgaaattgatgatgctgcggaagcttgtcagaaggcatttggtactgtctacttcttcattggtactagagatttaattcaagagcatatagccttcagagtatggccgcttgtagagaactgggaaatgccgaaggagactgtcaccaagtctagcgaaggtgacctggtccggctgaagtatacattcagaaatggagataaatttgatgagccgaatgatgactggttgaaatgtatcgaagctacaagtgatgaactgcttgggccgtattcgaaagccgaagataacgcattatctgcggccttcgggagccgaaaaaagaagaggctaaatagagttttaatgctattggattcatgtaccctgactaccgctacccaccatgggggcagaagagaaaattgcaacttctcggaaggatgttgcttcagctgctccaagcgagtccacgccaaagaggaaaaag

SEQ ID NO: 193751 - DNA, 196 bp, Arabidopsis thaliana landsberg
ttttattatcaccagcttgggttaccggagcttccttaatagtcagatcatttgtctctcaagtaaattaggatttgacaaagcagtttctccagtcagcatcttacaattctcctcaactctcagcacatccacaaatagaaacgattcgttcctccggaaagccgtgttcaaagccagcgaaccaactaattaa

SEQ ID NO: 193752 - DNA, 95 bp, Arabidopsis thaliana landsberg
accgaactcgcggtggagccgacattgacctaaaagtctccgaatatcgaaaatgccttacttcacttaaaaacacactggatcacgacgactaa

SEQ ID NO: 193753 - DNA, 324 bp, Arabidopsis thaliana landsberg
gggaagtgcaatggctgggacagtagtgctctcacgaaggaagatataaaagccatatggttgaggaagcaagaaggtgtgatcaagcgcgatcgtatgttgaaatactcccggtctcatcaggtaaagtctctctcaagatctttatatatttggtttgaggtctcaaggagttgtttttgcaggagagaagaagtcctcatatgcttgaggactcactgagcacaccaaggcaacgtgtagggctcatggattctttgtttgttaactacaagaaggatggggataaagtctctctctggacttcttttgtctgcgaaaata

SEQ ID NO: 193754 - DNA, 747 bp, Arabidopsis thaliana landsberg
atggccacaggggcagttactgttgtcagaggatctaggtcctctgtcgaagagttactgcagatataccgacattctgaaaggtatgccaacacttttcatttattatgttgtttgacgtaaatatcatacctactcttagagatgcatagtttggctttattataccgacctcatctttgtgccgtttgtttcgtcatcttgttatctttttttcttcaaacaggtctagttctatatcttcagatgcatctgaatatctaatgatgatgttgattctaagagcagtatgtttggtttagattgacagttttggtatcttcttaggaattaatgttctgctttgatgtagttctaattaaacagctcttgatttctcattttatcttattgcaccagctctcctgtaaaatcgtatctattcaaaaagatctttgccccctcaatatattgtgtctcttcagttatctgtgcatttgtttagaatatagactgtagagatctataatttcaactgatctatattgcagcgtagccattgttgtggataatcctgagtttttcaaccgcattgctgagtcatttacgtcaaaggcatctctgagatttttgatacttctctggggtgagaaatcatcactagtcacacaggggatgcagattccagtttacagttatgcagaaattataaaccaaggacaggagagtcgtgcaaaattatcagcatctaatgataccagtacgtaa

SEQ ID NO: 193755 - DNA, 55 bp, Arabidopsis thaliana landsberg
tcgaaaacgagaacatactcagcgagatcgcctaactgacgaagaataccgatga

SEQ ID NO: 193756 - DNA, 179 bp, Arabidopsis thaliana landsberg
tgggccacgtccatgaggctttaaagacttgttaccgaccctacaaatcaccatatgacctttctccatgctttgtcctcactcgcatggttccaccaattagttcccggaaggttacccatcttgaaactattatagcccaagcacgcttaattgttgagttttttcaaaacgtgtga

SEQ ID NO: 193757 - DNA, 87 bp, Arabidopsis thaliana landsberg
gtcaatatgtttcatcgttatagcgtaaaacttcgagtattcattcttattcgggttatggtgtacattaaacactttcctatgtaa

SEQ ID NO: 193758 - DNA, 511 bp, Arabidopsis thaliana landsberg
ccaaaaacacaacacacctaatcttaataagttgaatgttattgctcatgatggtgatgatctaggcaatagatggcaggcaaaggcggatgttccttctaacaatgcgattcagagaaccttagacacgactttacctctccaagagagcaacagattgaaagttgggaatgatttagctactgtcgtgtctttgagtgtccaagatcatacagatatagttgcatcagagaatggtcaacaagctgatgtgcctgagaaggttcctgaggaatctctaggaccggttacagacaaagatgttacggctcccaaagatgggtatgaagaagtggtgagtgggactcaagagggagaggatttagcggttaaagacagtctgatggaggaagcatcaattggtaagaagatagagtccttaggggaatctgatgatgatcctattcctagtcttcaggaaggtgattttctctcctcttcttctgattctgattctgatattgaatcgtaa

SEQ ID NO: 193759 - DNA, 689 bp, Arabidopsis thaliana landsberg
atgcatctgaagaaatcatctgtaacagaacgacgattaatcgggaaagacgattccgatccaaaccaaatccccaatccgattcatcatcatcatcagacccagaataaaaatcgaaccgccattgataataaaggctctggcttcactaagtataatcatccccaaggtcagaatcatcatcacacggttgatatcccaaccggtgttgaccatttccgacgaagaagcgcacgggcacgatcaggatcgatttcttcatttttcccatcaaatcttttgtcttctctttcttcctatcgtcctgtgattgctcggttcttgaggaagcttctacgctatacccttagagcccgtttgatttgtttccatcttcgtttcttgcttcttctcgctgtccctcctttatacatcttcttccttgttatcaatcttcgtatcttccttcgtctagtctttgtgattatcgctttatccttcatcctctcgatctctctcagattcgctcttcctcacttaacatcaattcgtctttttgtcgcacgcttgctgacatttatccctgccagattctcttcctctcagccgagcactgaccgagttgtttggtccattgggtcgaagccagttgcggagaataataagacaaattcaggatcttgggttcagaagtatggcactaatgatat

SEQ ID NO: 193760 - DNA, 230 bp, Arabidopsis thaliana landsberg
cctttccatcaattacaatcgcagatggagaagaagaggagcgaatggagagagtgcagcgccaagtagacgcagttgtccgtaagctgaattggctgacgctcgggcgggggaggaaaacaccattgcggttgtataaatggatgagacgcgacgttgtggaggaggagcaatcagtaaacatcatcgacgccatttgtttactaggcaaacagaagaaaacaaagtag

SEQ ID NO: 193761 - DNA, 630 bp, Arabidopsis thaliana landsberg
atggtgtcttctcctactgaagaaaacatcgtgatacatgttggcgcgtatcgttctttgtctccaaccaccaaaaatagaaacttaatgttgttttgtgtgtgtgttttcttttctaattaggatagctgcatttaactaaatggacggaccggaccatgttcagaccgatcttgttattaagtggaacaaaatattggattgtaaataggccggtttagtcatttgtatttagtcggtttagttggttagtgtttataccatagctgtatataaacaaagcaatgtgtacattgtaagagaagaaatgaataagatcttctctttctttaacaaactttccctttcatcatggcttcgtcgtgatacaaaacgaactttggaaaaccgctaaatggaccaacaaaaaaaacgaaacttaatgttgttttatctgtattctctctatttaggattccagcaaacctgtcaatatggacggaccaaacttattactaagtaaaacaaatcaatatcttcataagaccatatgcaaattgaccaccaaaagcaacaagatcaacacaaaaacttgccggactagacaactgtttggatgtaacgatgtaatgaaaatcgacatcaacatac

SEQ ID NO: 193762 - DNA, 1480 bp, Arabidopsis thaliana landsberg
ctgaacgccttcagttcccaaattgatgaaaaaattggttgcattagtcaggctactgtaaaggatgtaacagcaaaacttctaaaacgcctcagaaatttagtgtatgttcattctactctgattcaatctaagctttttaatgtgctgctgtgttttacgctcttgtttcagatgtttttggtcgtcataaagcgtattcgtgatgaaattctgataaaaataatacttggtaaaacagattcttggaaagcttattgagtaatttgattacactatctcctcagtctctaccggagctccacccttattctgaatctcatgtagaacatccgaggaagaagaacgagaagaggaagctggacgatgatgcctcccaacgcaaggtaagcatgaaaaataacttgaaaaaatcaaagcactcagatgtgaatgaaaagctgcgacagccaactattatggacgcattcaagaaagcaggagcagtgatgagtcatagtcaaacacagttacgtggaaccccttcccttccatctatggatggcagcacagcagcggggtcaatggacgaaaattgttctgataatgaatctctaattgtgaagattcctcaagtttcctcggcacttgaagctcaaagatttaagttcaggcctcttcttcctcaatgcctttccatcttaaattttccaaaggtcggccaattcaaacctctttatctggttgaatattagtatctactactcttttgaatgattgtcatagatactctatataaatatcacatgaattcacattgaattttagcctgagtttgtattacattattcttggaatgccatcaaaggcagcactacctgtcgtacatagcttaaatgtcatcacgaagcttataggaatgattaacatttttggctttcacatataggttctaagccaagacatgggcagccctgagtatagagctgaggtaccaagacaaataccaacatattctgttaaacttaattttgtagatatgagaagtgctacttaacgtcttattattttctttgctagctgcctttgtatttgtatctcttacatgatcttcacaccaagctggattgtcttgttcctcctggtaaacaacatccttttaaacgtggaagcgctccaggttatttcgggagattcaaattggttgaacttctcaaccaaattaaaagactttttccaagcctcaggatacatttgaatatagctatttccttgctaataagaggtaagataactggagatgatcaacctgttgcgagctaaagatattgatttagcttgttctaatgttgcctaaataatcataggtgatgaaacttctcaaactacttggagagatgagtttgctttgtccggaaatccgaacacatccagtattgtggtttctgaatctctggtttacacaatggtgtgcaaagaagtattatactgtttcagcaag

SEQ ID NO: 193763 - DNA, 200 bp, Arabidopsis thaliana landsberg
atgatgaccatgaaatctcacatcaagaaccttaccgttcagaccacattgtttggacaatctgttgctaaggccataccaaagaccctagagtgctcggtggtcgagctgacatcaaactggttaacagagccgtctcttcaggagctagtggatgagaacataaactcaactagacccgttgacaacaacctcgggaa

SEQ ID NO: 193764 - DNA, 570 bp, Arabidopsis thaliana landsberg
atggttcgtactagtaatggtttaaatgtgaagaagaagacccctgcagcacttgaaaaaactcttcctctgcaagatgacaccggatccgacgacgcaaatcttcctcctccgccagacgacactcatcttcctcttcagccagacgacactcatcttcctcttcagccagacgacactcatccttctcttcaaccagttgaaactgctactctccaaccaacagatttctctcctccgtcagaaaacaaagaagatgatgaagctactgcccatgagaggtctcctccattgtgtccacaagtacgttgagaagtgaatcatctttttgttttggaataactatcaagattgatacaactaaaaattttgttacaactattcatgacagttttgtttggatttgtaggataatgataaagatatggaggatacccaaccacttccacctgagatgttttattttaagcaaaccaattatacagagtgttgtaagctatcttcaaggtctgaagagaatagaacgatgaaagagtgggatgatatccttgcagaagatgagaagaattg

SEQ ID NO: 193765 - DNA, 452 bp, Arabidopsis thaliana landsberg
atgctcagacgttcagaaaagtctacaactacagaagagaacagtagttttgataaacaggtggagctgacagctaatcagaaagctgatttacagaaaccagaagacagtaaggagctacaggcagcagataggtcagctgacactatcaagccagaatcaaaaccttacagtatcgctcaaatccgaacaaggaggattggagttggaccaccacaaagatacggttatgaggatatggcaggattctgtcttgaggatatggcagggtatgctttacaggttgcagaagaagtggatactcatgagccagccacttatcgagaagatgttttagggattgaggctgagaaatggtttgctgcaatgggagatgagatggaatctcacaataaaaatcagacatgggatttggtcaaacgaccaccaggaagaaagattgttccttgcga

SEQ ID NO: 193766 - DNA, 103 bp, Arabidopsis thaliana landsberg
cagtggcttccacaaagacttgaagacaaagttcacaccctttttcagcgaaaatggttttgcatttttctttgaatggtcgagagggatggttcggaactga

SEQ ID NO: 193767 - DNA, 113 bp, Arabidopsis thaliana landsberg
ttacgctgaatcatgtcgatgttgtctctataccgcagaagattgtcaaaaccttaagatggagtttgcatacattgggtgaagttcctcgatccttacactcgaagtgctag

SEQ ID NO: 193768 - DNA, 59 bp, Arabidopsis thaliana landsberg
aaagagtaaagcgagaaaagtcgctaagtttcggtgaaatgttcgcgtttgacaaataa

SEQ ID NO: 193769 - DNA, 135 bp, Arabidopsis thaliana landsberg
ggaaaagattacacatatcattgcacgagtggggaagagttagagaagagcaacgttttgggtgtgtacgtacggatgcagcggctgccacgggaggagcgggaaccgagaagtcaaagaggtcaagcttgttga

SEQ ID NO: 193770 - DNA, 806 bp, Arabidopsis thaliana landsberg
cgtagatgtgctaatagcggatgtaggtgatggagttgtcgaggagatcgttcacgtcacaaggtctaacatcttggacatatgtctcgtcaaaacagggacgagtacaccaatgatatcagccatagaactaagacctttgcgatatgatacttatactgctcgaaccggttccttaaagagtatggcgcacttatacttcaccaattcagacgaggcaatacggtatgtcaacaacataacataattaagagtactttatatttagtaccatgtgtttttttttgctcattgacataaacttgatacttgagtgtcgcagttatcccgaagatgtctatgatcgtgtttggatgccatattcacaaccggaatggactcaaataaacacatcccggaatgtaagtggcttttcggatggctacaagccgccacaaggtgtaattcagaccgcctccatacccactaatgtcagcgagccattgacctttacatggaatttggaatcctctgatgacgaaacttatgcttacctttactttgctgagatccaaaaattaaaggccaatgaaactagggaattcaaaattttggcgaatggtgttgattacattgattatactccatggaagtttgaagcaagaaccttatccaaccctgcaccactaaaatgtgagggaggggtatgtcgtgtgcagctgtcaaaaacaccgaagtcgactctaccaccactaatgaatgctatagagatttttagcgtcatacaatttccacaatcggacacaaatacggatgaaggtatgtag

SEQ ID NO: 193771 - DNA, 671 bp, Arabidopsis thaliana landsberg
atgatcccaatcgtaccgttggtttcttcctccgagggtaaaacgggtcttttcaaatcttccgacgaggattacacgaaatggttagactcgaagctcgagagatcagtgatttacatttccttaggcacacacgccgatgagttaccagagaaacacatggaagcgcttactcacggcgtgttagctacaaacagaccgtttttatggttcgtgaggagaaaaatccagaagagaagaagaagaatcggtttcttgaattgatcagaggaagtgatcgaggattggtggtgggatggtgttctcagacagctgttttggcgcattgtgctgtgggatgttttgtgactcattgtggttggaattcgacgttggagagtttagagagtggtgttccggtggttgcgtttccgcagtttgctgatcagtgtacaacggcaaagcttgtggaggatacgtggaggattggagtgaaggtgaaggttggggaggaaggagatgtggatggggaggagattagaaggtgtttggagaaggtgatgagtggtggagaagaggcggaggagatgagagagaatgcagagaagtggaaggcgatggctgttgatgcggcagcggaaggtggacagtcggatttgaatcttaaaggttttgtggacgaggatgagtag

SEQ ID NO: 193772 - DNA, 288 bp, Arabidopsis thaliana landsberg
atggtggatatgctgagccaggtgatgctgggcgacggcatcccggcggtgattatcatcggtgcggccgaggtagcgattggtctctcgttctgttcgaagaagctcacccgcgtcagcctcgccgccttcgcggtacacatgctcctcaccagcctgccgctcctactgctgcgcgacctcacctggcaatccttcctcgtcccaaccatggaaggccaatacatcatcaagaacctggcgctcattggccttgccgtggtgatcgccaaaacgaaaacgaagtag

SEQ ID NO: 193773 - DNA, 450 bp, Arabidopsis thaliana landsberg
ggtcttgatctcctcctagccatcttaatcgaggagaagcccattactctagcaccaaattctgccagggtagtaccacttttaccttcacaaaatcctggagtacatcaccaaccacctgttatgccggagggacctgaagaagttgcttcaatgtttgatagcattgttatgaagcattcacaatttcttagcgcggcaagcaaacttcaggtgattgctgagtcgttatggtgttttcgtttgtcctgttaaatcgaaaatagttatgaattatttaaggctctttggtgttttattcactttggaagctgcattaatctgaacaaattatatgtactctttttcccgctataggttgctgatgttgttatccctttaagggagatggctcacacagatgccaatgttgcttatcatttgtgggtgctagtatttccaattgtgtga

SEQ ID NO: 193774 - DNA, 228 bp, Arabidopsis thaliana landsberg
agattattcattccctccaatggatctccgtcggaggcctcctaaaccaccggttaccaacaacaacaactccaacggatctttccgttcttatcagcctcgcacttccgatgacgatcatcgtcgccgggctacaacaattgctcctccaccgaaagcatccgacgcgcttcctcttccgttatataacacaaacgccgttttcttcacgctcttcttctccgtcgc

SEQ ID NO: 193775 - DNA, 926 bp, Arabidopsis thaliana landsberg
atgaaggtggtaacccagatgcctggttattcagagtcgagcagtgtttttaaacctacaatgttcgtgaagaggaaaaacttgcaaaggtaatctcttgtttaactggagcttcaataacttggtggagatgttctaatgatagggaaaagatatactcttggaaggattttcaggataagtttaaggttaggtttaggccaagtaggagaagttctgctatggatcatttgctaaatatttggcagacgagtactgttgatgagtacagaggcaggtttgaagagctcattgttgagttacctcatgtgactgcagatttacttgaatctgcttttctcaatgggttgaggaaacacttgaaagatcaagtagtgagatacagaccagtagacctcacggacattgtagagatagcacgaatgattgaatctcaggacagagacaacactaactatcaagtccgtcaacaaaaccgaccttctactgcaaccacacaacctccacaacctcaaaatactgtgagggcttatgacaaggtgttgtcaaagcgtcctatggaaccctacatggatactaaccctgcttcagggagtggtattacgaacactggagaggtaaggaactccaatccttgccgttattgtggagacaaatggttccctagtcataggtgtaggcagcagagactgaagagtctgaatgttattgaataaaaggaagagagtcccctcattgaagagctagtagagcccttaacaccagaagagggtgaagcagatgaagagttacatatactgtctttgggttccttgtctgatctttccagaggtaaatcgatgaagatgagagactatatcggaagtaccagtgtagtggtgctcattgattccggtgctaccagctgctttattaatgagagattg

SEQ ID NO: 193776 - DNA, 62 bp, Arabidopsis thaliana landsberg
gcagccttattgagcatgtgagagagcacattcatacaaatcacgaacaaatacggagatag

SEQ ID NO: 193777 - DNA, 84 bp, Arabidopsis thaliana landsberg
atgcggatgtatgtggatgtccacaagagacaagagccgtggctttgtgtagttgcctttggtgcgtggaattcgcagttgcaa

SEQ ID NO: 193778 - DNA, 151 bp, Arabidopsis thaliana landsberg
tggtgtagaggaggaagacgaggaatataagctgcccgtaacggtgctgctgcccgaactgaccggtcaaaaaaacgggttcgggggagagaagagatggttgaaagtgacatcgctttgggtttggggtaaagtagttgaaagctcttaa

SEQ ID NO: 193779 - DNA, 81 bp, Arabidopsis thaliana landsberg
tcgtcacacagcttaactgatgaaaaggaatctttggtcttgtatttggaacctctgaagctcactggtttggattattaa

SEQ ID NO: 193780 - DNA, 788 bp, Arabidopsis thaliana landsberg
  unsure (1)..(788): unsure at all n locations
atgtggtccgacgtgctccacggagttctctgcgcctaccgaactacacctcgcaaatcaacgcaagaaacacggttctccctcccttatggtttagaagcagtaatccctgttgggagcatattaccaagcgtgagaaggaccgccagtcctggtaactcggtacctgaacacgcaaatgttacaggacaacatggacttcatcgatgaacgcagagatcagggaaagatctgagttcaaaactnnnnnnnnnnnnnnnnnnnntactataactctaatatcaaaattcggagattcaaagtgggagagctcgttttacgaaaagtgttcagcaacacgagagagctaaacgctggaaaactgggaactaattgggaaggtctctatcgaatcacagaggtggtacgtgacggcgtctataagctcgtaaaagttattaacggagtacctgagttacggtcttgaaatgccatgcatctcaagaaataccacgaataggtactcaaaaccaatcgaactacgataaggcttgatcccttggcagggtacgtaggcaactccccccaagagcgcagccaccacttcaatcaaatcacaaaaggacctaatcccttaaccaggtatggaggcagtcacctccgcaaacgcaattaccacctcaacccttccatctgaaaggcgaaacttcaataagggaaatagatatcgcatcccccatcaacaaatatcagctgctcacctgacagttcaacctctcttcggtatcgaccaggtccttgctcaatga

SEQ ID NO: 193781 - DNA, 33 bp, Arabidopsis thaliana landsberg
atgagccctgcatggcgatgtgacatgagcatg

SEQ ID NO: 193782 - DNA, 367 bp, Arabidopsis thaliana landsberg
atgatggaaatctcagtagcagcagatatccagattgttttcacaagaactgaatgggagacttatgctgacaagctccacaaggatcattttgaggtactgactgccttcaatgactctcgtaatgtaggagctcagcatatgaatgctaatataaagttgttggcagatctcgactccctaaaatcagaattgaaaattgagagaaatttgagaaacaacttagacagaagagttgaagaactcacctctgagttagatgaaaaacatttgttgttagagaactttgatttgcagaaatctcacgtggaacttttggagaagatggtagctgagctggaatctgaaaagtcttttcaacgtttga

SEQ ID NO: 193783 - DNA, 408 bp, Arabidopsis thaliana landsberg
gctcaagacagccagcaagactatgtaaatgctcacaaccaggcacgatcgcagataggcgtaggccccatgcagtgggacgaaggacttgcagcctacgctcggaactacgcaaaccaactaaaaggagactgcagactcgtacattcccgtgggccttacggggagaacttggcaaagagtggcggtaacttgtctcgtgtagctgccgtgaacttgtgcgttaacgagaaggctaactacaactacgatacaaacacgtgcaacggagtttgcggtcactacactcaggtcgtttggagaaattctgtgagactcgcatgtgctaaagtgagatgtaacaatcgtggaaccatcatcagttgcaattatgatcctccggggaactatgcgaaccagaagccttag

SEQ ID NO: 193784 - DNA, 183 bp, Arabidopsis thaliana landsberg
gacatcacatgtgttacagttgcaactgttgatgctatcgatgatccttatcgttggtgttatctctggtgcaagatatgtaccaaaaagttgcagcattatccagagaaaaaggttataatggccctccgttttacgtctttgatacttttggtagtggattgttaccgacgttgtggctag

SEQ ID NO: 193785 - DNA, 416 bp, Arabidopsis thaliana landsberg
ctccaagcagtagcagctgatgagatggacaacaaattacaacagctttatgcttatgagaaatccagaaagcctgaaaagtttctggatgctgtttattacgaaaatgctcgtgtgcttcttcccgatgaggatatataccgcattgaatgtgtatgaattatttactagagcacagttttggaccaagcaagctcaaggaaacttcttaatatatgtatctttgtgcttttattctgcaggaacaatcgacaccaagcaaactctctattcagcttctggactatggacatgataagcctgatgtgacatccatatccatggacccaacttttgcagcttacctccacaaatgtattcctttctttatcaacctaatgcgaaagaaaatccttcgaatctatttgaaacggtaa

SEQ ID NO: 193786 - DNA, 53 bp, Arabidopsis thaliana landsberg
atggccgacgacgaattccgcgtatacgatccacccgacgaggtcccaagctg

SEQ ID NO: 193787 - DNA, 381 bp, Arabidopsis thaliana landsberg
ctctggctccttggtgccctggtctctcactcggagtttgatgttgtggatttccttatttgtgagatcgaggacaccgttctggatggtctgcgtgctcgtcgacagctgccctatgctcactatctgtgtcacatttttgctcagctgattcggcctccacagttccagggcacacttgaggcctctcgtctcctctttgggtcctaccgtccagcgcctgagaatcctgtgccagcacctgctcctgtatttgacactcaggccgaggatactgctcttcatcagttcgaagctcaggacgcagcagttgatgatgatgatgatgattttggggattccacctccgcctccgcctcctatgcctccacgctcacatga

SEQ ID NO: 193788 - DNA, 239 bp, Arabidopsis thaliana landsberg
cttacaaggattggttctatattcttagagcaaacccagagaatcatcaaccccagaaacgagtggctcaaccaaggatcagagtgacaccaaacgagatggtacatatcatcagacctagcaatcccaagaaaccgtatttcctgcaacatagagattataagattctcaaccaaaaagtcgactcagagatgaacttaaatccggaatgtagaaatattgaaatcaagtccaagtaa

SEQ ID NO: 193789 - DNA, 99 bp, Arabidopsis thaliana landsberg
tttaacaaagttgtcgaaaaactcaattatactgcaaatgaacgatttgaacaatataatagtgttgaagctagtggaataagatatattcagacaaag

SEQ ID NO: 193790 - DNA, 200 bp, Arabidopsis thaliana landsberg
ttcttctttctccatcaacctcgtttaatggtatctctcttaatgttggaatagaatggtcggagtttgtcgcggatcagacggtcggagtttgtctcggctgtcatcgttactgtcactgttaccgtcatcgtcacaaccggagccgccgccgttcagctcatatccttgtcaaacccctaaaatttgtattgggttga

SEQ ID NO: 193791 - DNA, 91 bp, Arabidopsis thaliana landsberg
atgccccgtgcattaaaacagaacataactcccacacggcgtcgttttctgctttcaataccccagtgcgatcggtatctttcgttgaatc

SEQ ID NO: 193792 - DNA, 351 bp, Arabidopsis thaliana landsberg
atggatccgaggaattcgagtgcgtggggtggggacgatggtctcccccttatctcatccatgggaggtgttgaatcaaagaatagatgctgtgtgactgacgacgatggctctattggtacgaagctatgtgagaaacctaaagctgaggagattgatttttctgctcggaaaaagaagttgaaatcgaagaaaggcgggtctgttagctttgctcttctcgatgttgaagatgacaaggaggaagcagaggatggagacgacaaaaatccttctattaggagtgatgaggtggttggagaaacttcaatgagtaagaaaaagaagaaggataagagtggcaagcatggg

SEQ ID NO: 193793 - DNA, 757 bp, Arabidopsis thaliana landsberg
ttttaacattcctagtcatcgtagcggctttaaaaaatggtttaaggtcaataggcctatttttggaggcgtcatagagacgcacgtgaagcaaccaaaggacaagaagtttattaatgctctgctgcctggttggttttttgatatgaactatggtttctcagatttagggaagatatgggtgttatgggacccatctgttgaggttgttattgttgccaaatcgttgcagatgatcacttgcgaggttcttctccctaattctcgcacttggattgttatctctgtggtatatgcggccaacgaagatgataagagaaaagagttatggagagagatcactgctttgggagcttctccggtcacttttaatagaccttggatcatgctaggagattttaaccaggttcttcatcctcatgagcactctaggcatgtttcactcaatgtggataggaggataagagactttagagaatgtttgttggatgctgaattgtctgttcttgtttacaagggcagctctttcacttggtggaataaaagtaaaactagaccggttgcaaagaagattgatcgcatcttagtcaatgagagctggtccaacttattcccatcctcttttggtttgtttggtccgccagatttttcagatcatgcatcttgtggtgttgtgctggaattagacccgatcaaagcgaagcggcccttcaagttctttaactttttgttgaaaaacccggagtttttaaatttg

SEQ ID NO: 193794 - DNA, 177 bp, Arabidopsis thaliana landsberg
gatgcgatggcacacatttggaaagcactgatacaagaccctaagaaagctgttgatgaacatttgaatcacatcttcgatgatctgctagtacaatgtggttcacggctttggcgctcccgtgaggcatcctgtttggctcttgctgatattattcaaggtcggaaatttggccag

SEQ ID NO: 193795 - DNA, 718 bp, Arabidopsis thaliana landsberg
atgggaacacattatataaaccgttggaggaacacagcctctcgcttagctaacaacaactcaacgagtgacatggacatcgccctcttctcaccggcgtcgctctttgccgcagacggtgactcctctggtcagtgaaatctctcttctttcaatttctaatttgatcgaagggagagagccataattagcgaagtaactgtaatttttattctcagatggagagacgacggagacgagccagaacttcgttgagagaaatcatcagtttcctggaattgtaatttcttcgctcccgaatttctcttctatcgtctgcttttagtaatatcaattccatatttagtttacgttctccgttgagagtgaaacctaagcttctgatttcagtgattttgagttcatatagtggattaggtcttagattgctctgctttggtgtttaactaaattatgttgccttgaagaaacgaattcatgaattcgctgtgatgtcttttgtgaaatagttttcttactgagattgagtttaaggttagtgttagtatttcaaacaagtttatgattacttgttgtttgaataggaactgcaaattcgggaatttggtttccaccagctgaatgcaaacttgctgtggccaggtacatttgcctttgctgattggttactgcagcatcgatatttgatcgaaaggcggcgctgtctcgagataggaag

SEQ ID NO: 193796 - DNA, 712 bp, Arabidopsis thaliana landsberg
atggattttgttactggactcccgagaacagcaagtaagcaggatgcaatttgggtaattgtagatcgacttactaactcaacttattttctagcagtcaataaaaaggacacagctgaccgcttagctcaaaagtatatggatgagatagtgagacgccatggagtactggtaagcattgtttctgacagagattcgaagttcacattgttgttttggaaagcatttcagaaagcagctttgggaaccaaggtgcacttgagtacaacatatcaccctcagacagatggtcaatctgagcggacgattcagactttggaggacatgcttagagcttgtatgctggattggggaggacgttgggaaaaatatctacctttggtagaatttgcttataacaacagttatcattcaagcataggcatgccgccatttgaggctctttatggaagaccttgtcgcacaccactttgttggacaaaagtgggggagcgccaagacattaagcctgaaataattcaagagtcaactgagcaagtagagctgcttaaaaacaggctaagagaagctcatgcccgccaaaagagttatgcagataaaagaaggaaagggcttgagtttaaagttggtgacttggtgtatcttaaaatgagattgttcaaaggactgaaccgttgggctaagagaggaaaacttaagtcgagatacatgg

SEQ ID NO: 193797 - DNA, 83 bp, Arabidopsis thaliana landsberg
caagcaactcaaattcgagaaagaacctgaccctgaagttgactgcgaccaatcaaaagagaaccaaagcagaaattgtttga

SEQ ID NO: 193798 - DNA, 189 bp, Arabidopsis thaliana landsberg
atgagcagcaccagctggcgttgtccgcatggctccagacgtcggcggttgtgggcatacaagctgctgcttgcggatgctcaaggcagccttgtgacggttgacctcggcacacgggggcgcgacctcgccctgtcggacggccatcagcagcggcaccgggcccgtatatccaagtgtgcgagcatg

SEQ ID NO: 193799 - DNA, 145 bp, Arabidopsis thaliana landsberg
atggacgtcatcacatgcagtgttgggatctatttgatcaacttgtacaatgggtgcgaagcccttttgttccaggataactccgttgtcaaaaggacatggacgagttccgcagtgtgtaataatcatataaccgctaacaatg

SEQ ID NO: 193800 - DNA, 3022 bp, Arabidopsis thaliana landsberg
atacactctgagtctggagattcctattttcttgtgtcgagtccggatttagcaggttctcctcctcatcgtatgcctcctcctccagttaacattgaaaaatccagtaacaatggtgcagacatgtcgcgtcacatggattcttctaatactccttcagctagagacaactatgtatttaaagaggaaacacctgacatcaaacccgtgaaacctatcaaaatcattcctcttggcttgccacccttgagaacaggtatttagttaggcaattgttttttgaattttctgtcctagattactatatgtgttttcgcgaatcttgatctttttggtttaccatctttcgagtgaactgatacatgatgttagggattttgaagggttatcggatgatgatttacgagaagcagcatatgaattaatgattgcttctatgttgctttcaaggtactcactctcttttctccttcatacatctctattctgtgttgcctatggtgcagccttgcagtctttttccagatagatctgtgtggtgtctctcattttcttagtttcttaacaaacagtgttgaggcgtatcctactcatagaagaaagatagaaaaaagctctagactaatgttaagtttgaaaagaaaagataaaccacatctgcagcctcagatctctaatacacactcagaggtcatcaacatgatccgtgtacagatgcaggcaagcttcaaaatcattagttatactataagtataagctagcattttctttacttaccaatataattagcagttcgatatttcaacttaacttcgtttgcatcacttgtgttaatcttactgtttctgctttatagatttcatcaaagatggatacatgcatacggagaaatctggtacagttggcaacattaaggacaggtgaacaaattgatcttccacagttagcattggggcttttggttggaatattcaaatcagattttcctaatgaaaagctctacatgaagtggtagactagacaggtgataacaaactacagtgctattttttcttgtcgtccttatgaaacttctttgagccatttcttggatttcatggtttgccgtagatcatatgataatattatgcaagtctggatgagaaaaagatatgactgattggcacataggcatagcttttcttccacagcttaagctaaaacgtaacctgcttcattacgcacatgtagcttgtgatctcggatggattgcgaattttgtttacttctacagcattctgcggtcctgtggacatttacataaacacgtcgacatgcatattcaaaatatctgaaaggcaacgaaaatttgctcagctttattgctacagtcattgaattatgtgcttttttccatcgtcaatgtaggctaacctactagaagaagtcctctgtttctcacctagtctggagaaaaacgaacgagcaactatgagaaaatgccttgcaacgattagagactcaaaggtgcgcactataattgtgatctggatgtttcgtagccagcaaattctcatctagtgatatgacttaacagactttttcttgaatctaaaactatttttggctggcataggaatgggatgttgtagtatctgcttcactacgtattgaggttctatcgtctataaggcaggtggcttcaaagttgtcatcactaccaggccgatgtggtattgaagaagaaacttattactggactgctatctaccatttgaacattagactctatgagaaactattatttggtgtatttgatactcttgatgagggtcaagtcatagaggtagattttcttagtccttgtttttcttcttatcatttatgtcatgcatatttttccctgacttcatatacatgtcaggatgcctcatcaatgcttttccatatgaaatcaatttggtcgacattgggcataactgagaatctacatagtgcaatatatggatgggttcttttccaacaggtacgtcttatcacttattcttcaaaaatctgctctatctaactgatcactatttggatgtgcacaaaaagatagcttagagctctatgtaccattgagtacaaataacatatcatcaataacatcggtctgtttcgtgtttaaattcaaaggtataaatactcaagtcgcgcacacacctacacatgtatataatgtaaatagtaatcttgtttagggaagccaaaatttagggcatctaaactcacagttggataaacggtaaaccaggcttaagtcctaccccttgctgctacgcaatagttaaagtactaaatgttgagttttcttaaatgttatatgatcctcactgtaccgatgcatgtatgctgcatacataatttatccagacacgagtttaagatagccatcacatgtgctcctttcctgggaagtttgtgtgcacaggtgagccttctcttctagggagcacaattcaggagttgcagaaagttacttctgctgaaagtggcaacccgaaggaagatctttatttaagtcatctagtatgttcaaggcaaaccattggaactgacatacacttaggtcttgtgaaggctattttaacttcagttagtgcttggtgtgatgataaacttcaggactatcatctacactttggtaaggtcagttctcgatcagtggcaacgaccttataatttacataatgttgcatattcttttcgaatcttctggccaaaattcttggtaccatatcactgtgtcgtaaactgtcctctttttcttggtaaccaagatcataagattttggctacgtcctaactgacgaaatacctttttcattattgttaatctatctcctcgatatctgtttttgcaactccatcaggacatcataataagcatcgtttttttttcttttatcttctactcctcagaaacctcgtgattttggaatgcttgtcagattggcatcaacagttggacttcctccagctgactgtaccagaactgag

SEQ ID NO: 193801 - DNA, 301 bp, Arabidopsis thaliana landsberg
aagaagaagaagaagaagaagaaaggagggatgatgattggtggttacagaagggtgaggagatggaaggagattggatcggagaaggcctcacgggcgaagcaataggagtcgatcgccgatcggaatcgagatcgggaacagaggagtgtggcggccatctccgagatgatgacggtggtgagatggttctgcgtttgtgtcagcgtcgtgtctcttattattgttattggatagaagaagaagagcatctcctccattcatcaaccatccaccattgcttttagacaacgaccaatga

SEQ ID NO: 193802 - DNA, 711 bp, Arabidopsis thaliana landsberg
ccggcgatcaaatcggaaaagacctcgattctttcgaacagcagcatccaggtaagtaattagaggccgatggtctgaaccttcaaaacgtttatacacgcatatgcccgtcggaaaggcctcgaaccagctacaatttgccagtgatctatccaaccgcgacttgataaaaaggtcaccccgccagcctctccaagagaaatggtttccggagtgcttgacgtcccacagtccgttctgggcaacaaaggatctgaaagggataaacgatccttcacaacgagctggacctcccactttttccgtgttatccagtgtatcgttgaggtccccagttatgagccagggcgaaattctattctcccccagtaaggagatagactcccagaattcagctctattctccgattgagggagtccataaatgaatgaaatgaaaagaacctggttctcaaacttaagttgagcgtcaatcagattaggagaggacgagagaatctccagattaatcccgctcttccagaaaagtgctaagccgccactcctcccttgcggaggtaccgtgaaatgatgcccataccccatccaatcaactaattgaagaaccttcgcatcctgatttttagtttctatgagaaacataatgtccggaaaaatagtgagacgtatttctcgcagacgatgaactgtcgggttgcttccatcccctga

SEQ ID NO: 193803 - DNA, 876 bp, Arabidopsis thaliana landsberg
  unsure (1)..(876): unsure at all n locations
cggacgaatggatatccagcgcaacagtcgtctacaaaagcgtgaacagtgcgcgcagaagtcagagcaggcgtcagaggtgcaccagacagtgaacagcacatgtccgatgccgcaccggactgtccggtgcgacataaattcagcgcttcaacggtcagaatcttcagaaccctaacggttgggtgacgtggctggcgcaccggaccgtccggtgccancatcgacacacagcctccctaacggctatgtggtggttgagggctataaatacccccaaccaccaccactccaagcatccaagtttttcagacatctcattcaatacaagagctagtgcaatcaatagaagacacaattcaaaaaatcaaagcctctctaagtcctaaattcactccatacacctagtgactagagagagagttttgttcgtgttctttgagctcttgttcttggatcgctttcttcttcctcattcttgttctctaagtgacttgtaatcagagcaagagacaataaggttgtagtggtccttgtgggtctaagtgacccatttgattaaggagaaacctcactaggtctaggtgaccgtttgagagagggaaagggttgaaagagacccggtctttgtgaccacctcaacagggactaggttatttggaaccgaacctcggtaaaacaaatcaccgtgtcatccgctttatttcttggttgatttgtttttgccctctctcctggacctagtttttttattctaatgctaaccccgttttgaagtttgcttaaagtttgtaaattttagtttccgcctatccaccctccctctaggcgactttcaattatcgatctcgcggattcgagtcaggtattggaacg

SEQ ID NO: 193804 - DNA, 221 bp, Arabidopsis thaliana landsberg
ccataactaaaggactcgcctccgtcgggcagtttccgacgacagagtctgtcggccggttaagacgaatatcgggggttctaagatcagaaccaccggagcagacgtcacgaccggatttatgttggagatcatcggcagctagtgaatcgatcaagcagaaaaccaacaaaaggaaaagaaagctcgttgaaaacgtcgtcatcgcgtggaatcaatag

SEQ ID NO: 193805 - DNA, 1239 bp, Arabidopsis thaliana landsberg
atgtctacccgatttatgtccatggagaaggaggcaagtgactcagattggtgtgagttatgcaagggtattaggccaagatggttgatcaacagtattattatgtagggggtggtgttacaagtgatttagattttcttcatgttaacaagtaacggtattttatgaccggtcaaactttcacgttgggtcgtaacgaatttctagttatacgcaacaattctcctcgtccaatttgcggcacctgcaatatgcgtcgtccgtatccagtaatgtttttctgggaatcggtaagctcatatcgttttctatgttcccctactggttgtattactatttgagttatccttttttttttttttcttaaagtttaattttgttttttttttgtccttttttccattgtctttgattttggctctatgtttttgagctctgttttttcatttatttggtgacttggtttgtagcagacttttatttaattcagtatttggtgactttatttgtatactttttttggtgacttggttcttgtttttgttctctacgacaatgaaacagtaacagagtgtgaaagacagagagagatatgacaaaccttaaagagtgaaagaggtgagaattataacaaaaaaggcatcactcgcgtaaatgataggcatgtcgggtaagcatggattggttctgaatagttaaagaaacaatgtcatggggataatctatagtagcagactgtaattccatagtaaaacgaacaaaataacccaaaactcacaatacgaaactttgtttgctaatttcttgtcattcatccacccaaaaaaaccacactccttaagattttttgctaaaaagattttttaatgataaaatatgctgatttagaccaaagattgaaaaaaaaattaagaaaaaaaacagatgaaaaacaattcacaaacaataaatggcacccattttttatgcaagcggcaagccgtagcgtttaactaaaatttcaaaagtcaaaacggttttggttgcaaggtcttttatttttcaagacaaattctcactcacaaagcacatgttgtcatgttgagatgtccattccaattgaggtgatcgtaaccaaaccaaaataattatagaaacccgaactaaaaagaaataaacttttatagttgtaattttttgtatcaggatcatcgatcggtaaccaaaccaaaagaaaaatcaagtaaaacgtcagtgtaa

SEQ ID NO: 193806 - DNA, 561 bp, Arabidopsis thaliana landsberg
gactcgtctagacttcgcctcgatagacgtctcacctcctaacaaccggcaggtcgcgttcttaaaacaggattcggtacttatcgaacacaggacatctgaagtcgatctctggagtctcactcaacttcaaaacgaatcccaacgatcttacgtcgaaaaattcaaagcaattaaatcgaagattgcgaacctaaacgaggaggtagccatagcagcccttcgtaacggtccgtggttttcctctagattccgtgaggaactcactgttaggcaaacagtctctttagacgatgcccttcacaaagctctccacttcgccaaagggaagaggagctcgctgtgctggccttaaggttcaaagaatctaaaacgcaaaacgctccccttgcaactaaaaaacccttcaaagaggaaaaccaaacgaaagggcagcataccctattcgcaatagaagaggcagccgaggacgagagtctagaacttgacctcggaaaatattgcaagtacgacaaaaaaagaggacattccaccgaggaatgtcgcgccgttaaaaattaa

SEQ ID NO: 193807 - DNA, 183 bp, Arabidopsis thaliana landsberg
atgaagcgaggtaagaccattggttacatatacatgggagcaaaactgaccggaagtttcaaccttttggatggttgtcgatatggggttgctcaagctcttaaggaactcaaatctttaggaatccaaactgcaatgctcacaggagataaccaagacgcagctatgtctactcaagaacag

SEQ ID NO: 193808 - DNA, 1164 bp, Arabidopsis thaliana landsberg
  unsure (1)..(1164): unsure at all n locations
atgcccgtcaacgctgatctcgtcaatttgacagttcgtgctcaccaactatcaggtcgtcaacccgagaattcctattcgtcaactgtcagctcgtctatccgaaagttcctgctcgtcgaatgttaaatcgtcaacnccgacagttcgtgctcatcaactgtcagctcgttaatccgatagttccagctcatcgactatcagctcgtcaatccaaaagtttcttctcgtcaacagtcagctagtcaatctaccagttcttgctcgtcaaatgccagctcgtccaactaccacatcgggctcgtcttcaagcttttcacatctcctcagcaactatctcctcgtatacatatcggttcgttacttaattgcaaagctcgtccagctcgtctagctcgccgacccagttaagaagcaatgccaaccttagaagaagtcttaccgaccaagtcaagtaacctcatcgaccttttactcggagaacttgcgatcgagtaacttaaagaccacaccaatcaggtgcaagaggccttgccgactcgaccaactagtcgacccgacgacttgaagttgctccaaccttgggaagtaatagtgtaaaaccagtcaaaaggtctcaccgaccagagaagaagtcttgtcgacaaggcgccaaacacaaaaatctttgaagtacaaactcattggagcaacgacaatcggcaatatcacatggccaaacctctcaaaagaaagagggaaagattattcgcaaccaaattgtcaaacccgttccccaccatgagacgacccagtccgccatactcgctaaactctccctcacggtcgctaagatccaatccattgagattcgcattaaatccgcgataactgaaggtggaacgaatctctcaacctcgctagaccgcacatcatcttcgccgagctccgcttccgactcctcaagctcgcctcccaaacgaatctcgccaactcgtctcgtcgagcatactctaagccgagctccacacttaatggaattgtcgcaaaggatagctcacgatgatcaaagtaatccgcaaaccaaacttcttctatgacgagctcgcttctccctatgtcgatctctccacaagcctcgatctgctcaactcattgagatctaaagccgagctcatcgcctag

SEQ ID NO: 193809 - DNA, 120 bp, Arabidopsis thaliana landsberg
gcggctcctttcttatccaaattcacttatactgttatgggtccggtacgcgtaaaccgggaatagtcttaactgttcttaaggtgggtcacagattcactaacacccacacaaaggcaa

SEQ ID NO: 193810 - DNA, 180 bp, Arabidopsis thaliana landsberg
gtggagaaaaaggctgctacaccatatttgatcaagaagaaaagtaatggaaaggtgaaatcaatcaaggccaacaagcaagccaacaaaggaaagccggccaaacacatctgggtgccaaaggaaattatttcaaccatgaaaagcaccaagaaggtttggatcccaagaggggagtga

SEQ ID NO: 193811 - DNA, 484 bp, Arabidopsis thaliana landsberg
atgagtatagagaactcgaatatcgcgcttgccatcttctcaaagaggtattctgagtcatatcggtgtttgaacgagcttgtgaagatggaagagcttgccaaggaaggaaaactcgtggtcattccagtcttctacagtgtgaaaacaaacgaagtgagaagacttgagggagagtttggaatacattttagaaacacaaaagagagatttgctatggaaccaatgatggttgaaagttgggaaaaatccttgaagtcatctactgttacagggaggattggcttgagcttggaagcacacatgtaatagaatatttaatagaactcttgttttgtagtaagatcgactttgtggtaaggtcgtctaatcagtttctttcactcattttgcaggaacgaatttgctcttgtcggtgccattgttaaagaggttacaagattactaccaaactctccaagaagaagaagaagaagaaaattag

SEQ ID NO: 193812 - DNA, 75 bp, Arabidopsis thaliana landsberg
atggaaggggatggaggagcgctgatggaggagatttggcgtggggaggatggcgctgacatcgcgtacgggtcg

SEQ ID NO: 193813 - DNA, 79 bp, Arabidopsis thaliana landsberg
atggactcgctcatagggtcgaacatcagcggggcagaagtgtgcagaggaaataaagtacatgtgagggcagtcgcaa

SEQ ID NO: 193814 - DNA, 73 bp, Arabidopsis thaliana landsberg
cctcacactgaccctaatgtcacgatcaaacaacatcaccaacgaagaacgacaacattcactgtggaaataa

SEQ ID NO: 193815 - DNA, 465 bp, Arabidopsis thaliana landsberg
gtagagatgctgataatgctatatacccaatagcatggcggtgtgtacaagtagaaaatatagataattgggtgtggtttgtgaggaagctgaaggatgatttgggactaatggatggtgatggttatatcatagtgtctgatcgtcaaaaggtaagaagcattcttaatttaagcatagtgtctgattgtcttttggtagtttattaatgatcgttttttttttttttcagggtttgattcgagctgttgagttagagctgcccatggttgagcatagaatgtgtgtgagacacatttatggaaacctgaagaaaaatcatgggaaagataaagagatgaagaagtatgtttgggatgtggcatggagctacaatgagaaaagctttgaagctaacatgaccatgctttacaactacaatgtggcagtttggcgtgatgttgtgaagtcaaaaccaagaacttg

SEQ ID NO: 193816 - DNA, 76 bp, Arabidopsis thaliana landsberg
gaggatgggcagggcacaggatgcgcacttccactttgcgcggctcttgagttgggcctggagcatgtggagggag

SEQ ID NO: 193817 - DNA, 164 bp, Arabidopsis thaliana landsberg
ccgttggttcgcgtgttccctggcgcctgtcgtgatgcggtattgtcatacccgccagcgacgcgcatgccacgaaagaaataaaagttcatggtcagacccattcgtgtccccccggttccggcgggcaggtcaccgcctgagcaaaaggggaatccagaggg

SEQ ID NO: 193818 - DNA, 382 bp, Arabidopsis thaliana landsberg
atggtcgatcataggtattttagtatgaaatactcaggaaaacaaaaggtaagttttagataaatagggaggttaggttaaattaagatcatttacgccatgggcaattggcatttgatccagagcttatccataggataagtgccataaatatcttttaacggcttccttgattatgggtatggttggtggtcgctattgggtaataagattattcttcttgtaagatcccctgcgctacactttgttgaagcaagtcctttgcaaaatgatcaatggtggtggagatagcctcgtgaacattttgattctccagcacctggctgtatcggacattgaattcctgcccggtcccccctttattggaaaagttttgcaataa

SEQ ID NO: 193819 - DNA, 134 bp, Arabidopsis thaliana landsberg
agttagatttcccttggttgtattattatgtttgctctatagaattacttatgaccaaagaacaaagttttggaaattctgagacgatgaactcacacaaatacgttaatcgcgactcttacatgcatcggtga

SEQ ID NO: 193820 - DNA, 369 bp, Arabidopsis thaliana landsberg
cgctcgctcagtggctgtgcgaaccagtcgccgcactcggacgcgcagttcgattgaccgaccgcgatcggtgcgccgtcgggcccggacgagatggcgtccagctcgtcgcccatgaactggcggtctcccaggacctgactcaggaactgctgtgctgcggggctcatacgagccgaaaggttgcctcctgcgctgtgcgagggcgtggcggtggccgggccgacggcgagcgctgctgcagctgcgaacgcaacggcgccgaaggctgtgccggtccacggtcccgctcgtctcggagatgggatatgcattgctcaagtcctctcgatcctgagtgtgagctgtcggacgtcggcgaccgggcag

SEQ ID NO: 193821 - DNA, 121 bp, Arabidopsis thaliana landsberg
atgcccagcccgaacagacccaacgacgggagggaaaaagccggcctgcgatcgaagcggacaatagtaaatcccttgagaaaccagaagaagaacagagatcccgccggagcaaaagtag

SEQ ID NO: 193822 - DNA, 154 bp, Arabidopsis thaliana landsberg
atgtcaaagaacaggcgcagaggaggaaggcgtgctcagcaggagcgagtcgctcaacaggatgaggtgccccagcagcagcacctgccacccccgcccccgatgtccatcgagcagatgtttctgatgcagactcaggcagttcaagccatcg

SEQ ID NO: 193823 - DNA, 227 bp, Arabidopsis thaliana landsberg
acctcaaacaagtttgtggttataggttggatgatgcgattaagctgctaggacatgtggttggggttcgggaggaaaagctcgggacagcgaatcctgtaacggaagacgagaagaggaggctggcccaactcttgaaagaagctggtaacgttacaggaaggaaagctaaatccctcaagactctaattgattccgatctcacttcttcttcagctcttcgttaa

SEQ ID NO: 193824 - DNA, 105 bp, Arabidopsis thaliana landsberg
atctctttgatttgggttttgatttttgatgacttgaaattcgacaccaccgaaggagtttcggccggaagagacgagataagtagagaacggcgacaaaattag

SEQ ID NO: 193825 - DNA, 151 bp, Arabidopsis thaliana landsberg
accagtattagcatgcgactctaattttgctagctctattgagcaatctgtggcggccggcatcgccaacagatgtattccgtattatgttagtctgttagtggtattgaggtcggttaataccgtggaccgtacttccttatcaccttga

SEQ ID NO: 193826 - DNA, 231 bp, Arabidopsis thaliana landsberg
atccctatcaatgagatacggaactcacatcaacgtggagtggtgtaaccattcaggttctgtgaaatacatattcaagtatattcataaagaaccagatcgtgttactgttgttgttgaatcgtctctaaattcgaaaaataaagaaaaaggtaaacagaaggtcaatgctgatactgatggatcagagccaaagaagaagaatgaagtagaagactatttcaattgcag

SEQ ID NO: 193827 - DNA, 777 bp, Arabidopsis thaliana landsberg
cttgaagattggtttgcttcaacattagaaaactcggcgagcgaaggaccggtctttgatgttccttttgagttggttgagcttcaaaagtttgattatgcattagaagggatttctttccagcagcttactcggatgccaagtcctgtttacgcttcttcgtctaatgctctggaggctaaggcttatctagctattgaggattttctacacgccactgttaagagcttgtgggaggcgttttggagtcaggaagagcctgttcctttctctgttggttgtttatacaatcagaatcttaagttttatcaggctgagagagctttagctcttgggaagcttgaaggtctttgcgtcacaggtattctgcttaaaaatcctcggcatcctcacgggaaatgggatcacattcttgaacttgctcttctaaggtctgacattggaagctttgcacaggatagtgatcgtctgccttctttacctgtcttaggcgaggctcttttctatgctgttcgtatactcatcgcaaggagtgtgagccgtttagatttttctcaaagctcaaactgtgtcttcattcttctagttgattcgcagtatggaggtgttgtaaaagttgaaggggacgtaaataaattggattttgacttgaacaatgtttatgagtgcgcagcagattggataaagaagcattctaagatagcagtgtcaccagttgacagaatatggaacaagctgggaaatgccaactggggagacattggtgctttgcaagtg

SEQ ID NO: 193828 - DNA, 329 bp, Arabidopsis thaliana landsberg
atggaactattgcttgtgccatattggtctgaccctgatttggatcttatccggtggccaccttttctattggctagtaaggtgaaaattaatcttgtgacttatatctagttacattttccgtttttgtattcgattttttgacatattcatgattaaatgtcatagatcccaatagctttggatatggctaaagacagcaatggaaaagaccgtgaactgaaaaagagattagctgttgacagctacatgacttgtgcagttagagagtgctatgcctcttttaagaatctcatcaattatttggtggtcggagaacgagaaggaca

SEQ ID NO: 193829 - DNA, 1339 bp, Arabidopsis thaliana landsberg
aaatgagaaaagctagttgtcagtttccgacttatgccgatacgtttggagaaggtagttcagtagcgacgaatgtcaatatattcgtcgttgtaaccaagtccatagcaggtggcagcaaaggtttcagagagtggtgtggtagagagtaaccaaggggatgctagtgaggatagggcgacacaactttcagatgctcaagcttggaagaaagcttcaagttctgttaacaaggatagaacgactcgactttcagacgctcgtgccgggaagaaagtttcatgttctgttaacgaggatagagctatttttgtgagcgatcgagtgtcgacgtttcctagcggaggaaggtttctggtagaggtagttcaagagattcttttcccattgtccgggaaagaggttctactcaggatattcaggaggtcaatcactccttttcgttcaattatgataggaaaagttgttgtttccagacaccatgatttattgtggtgagtttggtaaaaaagttatcgggtcgtcgcatgagatccctccccttgaattccctattgcgaaaaatctctaccaaacttgggcttgtaaggaggtttaggaccaaacttgggcttgtaaggaggttcaggtacgtttatcctctatttcttgatttgtcgtgtttattattttatgttatgataactttttgtttatttttcgtttatttttcttttttttataagttgattgccgccggaaacgcgttacaaaattttcttgaggaacatgcgagggaggcaagggagaaaacagtggccggttaggaaaaatgaaaaaccgcaattttattgcaacgactcgtttgcgtaacttaaactaggagaaatgaaggattgagggtctcgaaaagcagatcaaggagctctcagaaaacctcagaaagtcgaacaattttggtcgagctgagaaatcaaggttcagaagttctcgtgacgatgcgtttcgaaatgctcattccgaatggagccatttcaaagatgaagttgctatttataaaggccggatcaatcagttacagaagcatatctttaacaaacgtgttgcggacgaatctcttttcatgcaatgtcaagccgtaggtactcggaaagtcttgaagaagttgatcaaaaaatgtacaacaatcccgggggagactatgtgtgagcttaaggttgacaaaaagaagttgcgtgatttagtcgatgctcttgagattaccgatcttcgtgacgatgacctcgtggcctttctagagtttgaggatgaggcagtgatgacgacggctgaaggcgaagcaacgagtggtggtagttaa

SEQ ID NO: 193830 - DNA, 335 bp, Arabidopsis thaliana landsberg
atggttccatggttgatggtatcagctatacaagtagcagagctatctgtgagctctgttgttcatatgttttatgggctttacatattcagctccgccgtcgccggagatcttactcagtcgttgagcgagtcaatcttcaaacccaaatccaccattgaagtcaaacaaattgaccaagaaaagacaacagacgtcaatgatttgcctcctattgttttggttcatgggattttcggatttggcaaaggagtaaagttcacaactttctctgcttttctacatttatgtgtttttatcgtttcgttgattggatttgccattgcagagattag

SEQ ID NO: 193831 - DNA, 79 bp, Arabidopsis thaliana landsberg
atgaagatctcaaaatgctggtaccttgacctcgggctgaaccaagacataatgcagcatgtcaaatatgatcggaacc

SEQ ID NO: 193832 - DNA, 130 bp, Arabidopsis thaliana landsberg
aaaccaaaataaagttactgatctaatttttaaaaagggacaattgcatgggaatgtcaatatgattacgcaaacaacttctgcagataaaaatggtttgcagaaaatggaaagcacctatccatcatag

SEQ ID NO: 193833 - DNA, 97 bp, Arabidopsis thaliana landsberg
tcactgtgtcgagcgtttctctttattggtggtagccctactggttacgacttacgaagtggccactgataaaattgaagccaactttgatacttag

SEQ ID NO: 193834 - DNA, 76 bp, Arabidopsis thaliana landsberg
atggggaaatgggtgcgcgcgcgggcgaggggatcgacgctgacaggcaggccccaccgcgcgggtgccgcacgtg

SEQ ID NO: 193835 - DNA, 376 bp, Arabidopsis thaliana landsberg
  unsure (1)..(376): unsure at all n locations
atgggatgtgccgagggcagccagttaacgaaactcagcgacctcgtggaagcacatatccgttatgaagaaagggaattgtttccccatctcgaagctaccctcacacctgcgcaactggctgatgccggcgctcaactggcggcatcccattcggcaaatcatccggatgattatgcagacgagttctgggttacaccaccacaaacgggcagtgtatgacgaatggctccgatcctatccgcttccaggtggatcattttcggtgaaaaaatatccatcactacttttcccgncgagtacaggaacctgatcggtgttgctcaacaatacgatctacttcgaagatttttggtgaatgcggcggcatgggcag

SEQ ID NO: 193836 - DNA, 119 bp, Arabidopsis thaliana landsberg
cttcgtcattcgtcattatcattttgacacaacgtcttcgtctcgaggacttcggcggagaagaagaccccaacaaccaggctccaccatacaagttttttttggaatttaaaatctga

SEQ ID NO: 193837 - DNA, 87 bp, Arabidopsis thaliana landsberg
cgttccaggaacggggcttccagcgaggggtctgtcataaagaacactgcattcatctggctcctgtcttcgggccttaccttacag

SEQ ID NO: 193838 - DNA, 110 bp, Arabidopsis thaliana landsberg
atgacggctcggcgaagagcctgtcggtaagcggcctgccggatggcgccaccgtagcctacagtggcaacggacccaccggtgcaggcagctacgcagtaaccgagaca

SEQ ID NO: 193839 - DNA, 261 bp, Arabidopsis thaliana landsberg
atgagcctcttcacgtcttccaccgtgacagcagggaaaaactccggtgatgatttcttcggcgaaggtggcggtaacatctcgtcgagtctaatacgattattattggacaaagtcaattccctgagtttctccatcaagttaccacctttaggaactatctccggcgagaaaaatgccctcttgtggagaaatctgcggcggattccagaatctccggcgtcgggaggaatgccgccggatttggtcggacgcattcgg

SEQ ID NO: 193840 - DNA, 427 bp, Arabidopsis thaliana landsberg
gggaaaggtgccgtattcccattattgccattaccggcaccaatggtaaaacaaccaccaccaggttaattgcgcacattgtaaaaaacagcggttacagggtgggttataccacatcggacggaatttatgtgcataattccatgctcacgaaaggcgatacaacgggtccggccagtgccgaattcgtgctcaaggacccaaccgtggaatttgccgtgctggaaacagcacggggcgggatcctgcgttcgggtttgggttttggccgctgtgatgtggcggtcattaccaatatccaggaagaccacatgggactttcagacattcatacgctcaaagacatggtcaatgtaaaagcagtggtggcccgcactgttaaacgcgatggatacacggtgctcaatgccgacaataaatactgcgt

SEQ ID NO: 193841 - DNA, 458 bp, Arabidopsis thaliana landsberg
  unsure (1)..(458): unsure at all n locations
atgagcagggaagacgagattcggcggacgatgaacaatgaggcgggccttaaaatgaacgctcggcaactcaatctggcgatttcctacgtgccggacgttcgctacctcctggagaaggtcgagcggctggaggcgcgatcggtcgccgagcaattcgccgcgctgaccgacgacgagcgcgcggaagtggtcgcgggctattgcagagcctgctggtgcaacgatccctnnnnnnnnnnnnnnnnnnnngaatgagcaaatccgaacttcagttcgtctccgccgaagaagcggcgaagtggccggagggctgcaacgtcctctgcgccctttccatcgacgggcgatcgctctttgacgcgagcatgaattggcacggacccaagggctacgaagaacgcggctacacgcatttcgcccgtctccccgacgccctgccggagttgagcaagtga

SEQ ID NO: 193842 - DNA, 332 bp, Arabidopsis thaliana landsberg
cctcgacctgccaagcgacttcgctttggtggacgctctcgtagaggcgagtccaaaccctctggggtatcgtatgcggtcaccctgggaccggctgacggacgtctcgacctacgggccctcggggtccgaggaagatgacgagcccgacttctgttgggatttctccggacttggtaacgccagtgcaatgcgggacttcatgaccgcatgcgactactgcctttccgactgttctgacggtagccacagcctcgacgacgaggactgcggcccaagtcgtgaatgtttccacgtcgatctagggggtcccaacgaaggcaaccatcttg

SEQ ID NO: 193843 - DNA, 252 bp, Arabidopsis thaliana landsberg
atggcacagagttctgaaaatgttcttcctactctacgagatttcttcgattctaaaaaggctggggaagaggacgagtttttgttttatcgggcgcttaactcctcgtgcaagaaacctccaaaaccgggaaacaaggcgaaggagagacatggtttcttcaatcagggatccaaggagagaagaagaaggaaaatatcagatgctgaaaagttttcagtggaacaatattcttctggtggttttttcggt

SEQ ID NO: 193844 - DNA, 64 bp, Arabidopsis thaliana landsberg
atgacatcatctactatttttgaagaatattccttgatcctgactctggacctccaaaccaaac

SEQ ID NO: 193845 - DNA, 201 bp, Arabidopsis thaliana landsberg
attctatcacaaaatctaatcaaagctgccttccactgtgtcgtggaaactcgcttgaataagaccaccggtgactcaggaagacgagagtcgaacagagaaggcggcgcagggtcatcgccatcccaccaccgtagagttgtgaaaagaaggaagaagaaactgatatacaacgtcgagaaaccaagctccttcgtgtga

SEQ ID NO: 193846 - DNA, 181 bp, Arabidopsis thaliana landsberg
cttcagccatccgttccgcagctggtccatgccatggcttatgctccatcatgcaacatgttcttcggatgatccaaatctgtccaaacctcggatacaacttcaaggtttcatgggagaaataatcaatttagttccagctactaggttgcgacggttaatgtttactgaatcaacttga

SEQ ID NO: 193847 - DNA, 120 bp, Arabidopsis thaliana landsberg
tacctggatccaggatcggacggctctgaatcaacgataccccttcgccctggctttctttctaaagaacccctggatttcttaaaaatcaacccgccgtccatgggcgatgttcactga

SEQ ID NO: 193848 - DNA, 1184 bp, Arabidopsis thaliana landsberg
ggtattgaaactgctcttgaaccagttccacatatcataactccaacaaagatgattcatcaagcaagtaagctttttcttcttccttttgctccttttatattgagtctattgacacaatcttgcttagttttcttgaattggttcttactttggtgtttgtggtagctggtgtgccgattgacaatgtcctgtatcttggtggaccaaacattgctgctgaaatttacaacaaggaatatgccaatgctagaatctgtggagctgctaaatggaggaagccactagctaagttcttaagacaacctcatttcattgtttgggacaatagtgatcttgtgacacatgaagtaatgggaggtctcaagaatgtctacgccattggagctggtaagtttctgtatgtagacacggatttgagtgataattatcaagttttcacactttgatccttcttgttgtgttcaggtatggtagcggcgctcactaacgagagcgctacaagcaagtcggtgtattttgctcattgtacatctgagatgatatttataactcatttactagcagaagagcctgagaaacttgcagggcctttgctagctgacacttatgtgaccttattaaaaggacgtaatgcatggtacggtcaaatgctggcaaagggtgaaataaatagagacatgggtgatagcataagcggcaagggaatgattcaggtacttaatctgttagaacaaagccttgaaagaagtttgaaatgttttggtatctgttttgcttatgaggatgtgggatttttgttgaatagggtgtttctgcagtgggagcattttaccaattgcttagtcaatcaagcttaagtatattgccctctgaagagaagaaacctgtagctccggtcgaatcatgtcctattttaaagacactttacaagatactcatcacaaggtagataatatgaagtctgaaaagtttatacttctccaaaaaatattgaactttgctcagtcagatttggtgtgacatgatgggaagttagatatctagttttcaagaatgtcttgggactttgtgagacatcaaatcacttgaaacttgcttcttctattatctaataaaattgttgttgttctattttgcagagaacaatcaactcaggccattctgcaagcattaagggatga

SEQ ID NO: 193849 - DNA, 421 bp, Arabidopsis thaliana landsberg
cggaaggcaaagctgaacaggcgcttcccccggccctagctccccatgaagctgagatcgcagactttgcatccctctgcacaaagacctgcaaccgcattctcagccttctttctctaggcctcaaagtacaattaccctacccttcccagctcctcagagcgatgagagttgaccctgccagatctccccctcattctttttaacccgccacgatccaatgaggggcccaacaggttgcatactgcgctatctatactacccatccatctctgcgccccagacagcagactacgaccatactgttgacgtacgtgctggcgcacactcggactacgggagcatcacattgctattccagagacctggacagccgggattggagatcctcacgccagaggggacatgggcgcctgttgcc

SEQ ID NO: 193850 - DNA, 290 bp, Arabidopsis thaliana landsberg
  unsure (1)..(290): unsure at all n locations
atggctacattcacccgtatggtgaagggccaaatgcgctgctactcggcacccgtggacgccgctatcccagccagcaagcgcaagtacattcccacctcgggcacgtatccgaagggattctttgtctcagggnnnnnnnnnnnnnnnnnnnnnnncaacaccaagttcccagaccttgcgctcatcacgtctgagacgccctgctccgcggccgcagtgtttacgacacacaacgctccaggctgcaccggtgcaagttaacaagaaaatacttaatgcgactcaag

SEQ ID NO: 193851 - DNA, 98 bp, Arabidopsis thaliana landsberg
gtcggaatttggcaaaagagaaaaacaggtttaaaggtttcaactttcaaaacgaggagacaaagtttcaatcactttcccggcaaaaaaagctataa

SEQ ID NO: 193852 - DNA, 178 bp, Arabidopsis thaliana landsberg
atggagtgtaatatcgttttggaaataaagcgatatggtcatttcctctgtataaacttgcatgcatatcatcaatctaaaaagaagaaatcagaagaaatatcatcaacccaaaaggcatcattttccgtttatcaggtgttgtgtagcaggcggactaaagttgatgggtttaaat

SEQ ID NO: 193853 - DNA, 372 bp, Arabidopsis thaliana landsberg
aataatatggaaatgcagagatcgtctgaaaactcaacgatgccgttttcagaggaacagaacttcaaggtgggacgttacagtgcagaagaacgtaaagagaaaatatcaaagtacagagctaaacgaaaccagagaaactttaccaaaactattaaggtaactattttgtactacataatcaaattttttttttttagtgcattttcagtttttgaaggctttattgtaaacttttttttttggatggaaatgaagtatgcatgccggaaaacattggcggacagtagacctcgaatacgtggtagatttgcacgcaatgacgaagttgtagaaatccccaacattgaagatgacgactccgagctttgg

SEQ ID NO: 193854 - DNA, 65 bp, Arabidopsis thaliana landsberg
aatttttcactgcccagtatcatcgcaaatgtggtggatatttatggtttgtacgcgacggataa

SEQ ID NO: 193855 - DNA, 176 bp, Arabidopsis thaliana landsberg
cttttaggtgtttaagcgtgacgcggatgctttcgggacttatcaggctcatttggacccgaaacaacggtgggaatggagaaaccggagtcagcaacattggatcaatcggtcccatcattagaacgatcgatccaatgttcatcgtcaaaaaccctcagccagctccagattga

SEQ ID NO: 193856 - DNA, 240 bp, Arabidopsis thaliana landsberg
gactttggagagctttccagggctctttctccgaagcaaccactgtatatcaaggtgagaaacttaagacctagtagctataggttttaatccttttattttttttcgctttcaagatctaaaaaggtcacttttttcaccatggttgttactcttaacatttcattttttttcttccagcggattttagagaactttcaagggttctttctttgtccgaagaaaccaacgtatatcaag

SEQ ID NO: 193857 - DNA, 191 bp, Arabidopsis thaliana landsberg
cgggctgggactgccaacaagcgcctctacttctacactggtccgcacggccagtacagagccaacgccgccgtactggtgagctgttgttcccgaaacaactcctgatccagctctctgcggcattcagaggcgcagtccgctgcttgcgacagcaatatacagtattgcagaacagcaacggctattag

SEQ ID NO: 193858 - DNA, 239 bp, Arabidopsis thaliana landsberg
cttgggataaagatgatgaaacatgccaagcatcatcatccacagtttctataccacaaccactcaaaccagtcactgtaactttaccactttcactgttggaaaatctcgaggagaagcaacgcggtgcaggtcgaaaaacggagataaaatctggcaaacggagacactttcttctcaaaaccatcaaagccattgaaggaaaagagaccaattctgaaaacgcacgtgaaaactaa

SEQ ID NO: 193859 - DNA, 105 bp, Arabidopsis thaliana landsberg
atccttcgacgatcggaatgtcccaactcgcacaggtttgtgatcttgcggaaacacatatctgagtattcattctgcgagagaagcctctctctgctttgctga

SEQ ID NO: 193860 - DNA, 255 bp, Arabidopsis thaliana landsberg
tgttcagttcttgggaatttatggtatgggtggtattggcaagacgacccttgctaaatacttttataacaagatcattgtcaacttcgagcatcgagcaatcatctatgacgttagagaacaatcatcaacccaagatggcttagacgatctcaaaagaactttcaaagttgctcgtgagaagaagaatattgtggttttagatgatgttgataacatcgaccaggttaatgcgctcgttggtgaaacaagctg

SEQ ID NO: 193861 - DNA, 59 bp, Arabidopsis thaliana landsberg
attcaagcagtagcaggtataagcccagtccagcaccaactaacgcctctgattcttag

SEQ ID NO: 193862 - DNA, 470 bp, Arabidopsis thaliana landsberg
atgacatccaagggtttgttgccaaacgcgttcacgtacaacaccgtgatgacagcctacgggaatgttgggaaggtggatgaggcgctcgctctgtttgaccagatgaagaagaccgggttcgtgccgaacgtgaacacgtacaatcttgtccttggcatgcttggcaagaagtcaaggttcacggtgatgctagagatgcttggagagatgtcgaggagcggatgcacaccgaaccgggtgacatggaacacaatgcttgcagtctgcgggaagcgtggcatggagactacgtcacccgggttctggaggggatgaggtcctgtggggttgaactgagccgagacacctacaacaccctgatagctgcgtacggccggtgtggctcgaggactaatgccttcaagatgtacaacgagatgaccagcgctggattcaccccctgcatcaccacgtacaacggttgctga

SEQ ID NO: 193863 - DNA, 307 bp, Arabidopsis thaliana landsberg
atgtccagttcgacacagatggattcgcaaatcatctcagataaagcggaggctgaacgaattgttaagaacgtagcacgttgccttgccagaaaaggattgaagtttgagaagaggatgatgaccaacgtcaaagatccaagaatcaactttctaaggaaccctgaagatccctttcacggatattacaagcagaagcttagtgattacctttctcagattcaacaaaatggaactatcgttgatgattttggtcatgttccagcaacgaatgttagtacaacagaagtcactgagcaacctccag

SEQ ID NO: 193864 - DNA, 805 bp, Arabidopsis thaliana landsberg
atgtggctccgaagattgcgacacccatcctactcaagacttgatgttctttctgaagatttggggacttctaaacataagaataaggataattctaactgtcatgtttgtcacttagcaaacatcgaaagttgtattttccatctgggaacaacatatgtaattcagcttttgagttgttgcacattgatgtttggggacccttttcagaggaaacaagaaacaattgatggttttaaatatttttttactgtagttgatgatcactccagagcaacatgggttgatctacttcgacataagaatgaagtactcactgtttttcctgatttgatcactcaagttgaaaatcaatacaacactaaggttaaatctgttcgatctgataatgcaagagaattgagctttccagcattctacaaagagaaagggatagttccatatcattcttgtcctgaaactccagaacataactcagtagtatagagaaaacatcagcacattctcaatgtggcaagggcattaatgtttcaatccaacatgtctttaccatactagagagattgcattctcactgttgtgtttctgatcaacaggactccttctcagctgcttgctaataagactcattttgaattgcttacaggtcagaaacctgattattctcagatacggacttttgattgtctttgctacagctccacatcagctaagaagcgtaacaagtttcaaccaagatctcgtgcttgtatctttcttggataccctgcaggtttcaaaggatataaagtgttggatatggaaa

SEQ ID NO: 193865 - DNA, 395 bp, Arabidopsis thaliana landsberg
atggctagagcaagtagaatccaagctgccacatcgttaacggcagctgccgacatagcaagtcgtcctatctcagtagttagaagctttagctccgctaagatacgggccaacacagggaatgcagtgatagagagtgccacacccatgaagacgagaaacgcggtactattcactcctttggagattgttgcttttaaaacgaatgaagaaccaatgccaagagcaaacgggagggttattccagccaaggcaattcccaaagcctttttcccggtgcgacgaagggctttggtatcaatctctagaccagcaaggaaaaggaagaagagaaggccgagattagccagagtttcaagaacagtcaagcttttcttcgggaacacagcgtctag

SEQ ID NO: 193866 - DNA, 219 bp, Arabidopsis thaliana landsberg
gagatttgtgcggattcaaacaccattgcagcacctctccataagttgacaaagaatggagaccgttttgctagggaccagggcaacaacaagcttttgacaccctcaagacaaacgtcacgcaagcaccactgctgcaacttcctgattttgacaagacattcgagcttgagtgtgatgcgagcggcattggaattggaggagtgctcatccaaggag

SEQ ID NO: 193867 - DNA, 1072 bp, Arabidopsis thaliana landsberg
atgaacaaagaattatccaccaatgtctcaagaatagagatcttgaggaagctggaggaagctaacgaagaagttaaacaaagtaaacaagccttggaagttgcgttaaaccgggtagaaatcgctagtgtgaagcaacttgaagcagaagaggcatttcggcagtggaacatagagtcatggaaagaccagaaagctgttggagcaaaacgctcgatgaaaagagaaagctttcctcagcgctctttcttgagccatatcaatcagcacgagccactgatcgatctccctgagccaatgctgaaacgtaacgtctcaatgggtaatgctcttaaccgaaaagatgagaaacagttggtcacgccgaggagaaagtttaggttcatacaaacacatcaagcttccattagaaaaacagagtaagctaaaaaaatacccaacctttgaaaacatgttttgcacatttcgattcctgttttttttaattcttggtttgatcattgatgggtgttgttgcttccatcaaaagcaaaacacagatgattagagtgagatgtgttgttttgactcaaatgtgacaaaaagaaaaacattatagtaaaaactaaagcttctagtaatcataattaattatgggagttagtgaagggcattgatcatatgatttaggtggtgggcactttcttaactaatgcattttaagtgttagattagctaattaggtgatccataatcaataccgtaggtcctcaactgtttattttttaataacgttggtctttataatgtttctagattctcaaaatagaaactgaaacattcaggttgaactacggagataaaaacacattttacgatttgaccagtttgtactttatactgtataagtttggagtggtcagatacagaatgatgacgtggtcaaggctttataagacaatctagatatctccgataacttaatgccacgtgttttagtcttcacaacaaagatttcgtctggaatcctcgtattggcttagagcgtgggaccaaacgaaaccaaaagaaggaaaaggaactaaataaataa

SEQ ID NO: 193868 - DNA, 420 bp, Arabidopsis thaliana landsberg
atgcaccggtatttgtactatgcggacaaccgtttgaagctggccgagagcagcagggacgggattatttgggacaaggacggcaagtatttttattacctgcacgggccattggccaggaaagagatcgggcagtacaaagtacagggcatggattatgcctataccctgcacggatggctcaagggcgtaaatgccaatgtgctggaccagcaaaaggagatgggtaaggacgcctataacagtaccgatgcaatgaacgggtattattacagtgataacctggacctgcaccgggatgaggccaccgatgcctttggctacagcctgagctattacaacggcaccaatgacgactacaatgccatcagtagcggcaccggtatgggcaacagctttttaacggatgcggagacttat

SEQ ID NO: 193869 - DNA, 83 bp, Arabidopsis thaliana landsberg
atggcagcattgcaggaagtggtggacaaaggtgcatttgctaacagtttcagttatgttatcaaaaagtctgataaggagcg

SEQ ID NO: 193870 - DNA, 69 bp, Arabidopsis thaliana landsberg
atgatagacgagagctgtgagatgttgatgggagatgggcctagtgggcccaatgatcacgtgacagag

SEQ ID NO: 193871 - DNA, 248 bp, Arabidopsis thaliana landsberg
gtgttgtgcgtggaggactggacggagattcgccggttgcatcgggccgaggggatggcgattcgggccatcgcccggcggctcggggtctcgaagaacacggtcaagaaggcgctggcatgccacgagccgccgcgatacgagcgtgcggccaagggctcccgggtcgacggcgtcgagccggcgatccgggtgttgttggcggagttcccggagatgccgaatacagtggtcatggagcgggtcgg

SEQ ID NO: 193872 - DNA, 1008 bp, Arabidopsis thaliana landsberg
atggcgacagggccgatgtcggtgaagtcgagtaagcaaccttcggttgtgcaattttggggggggggactatataagcgtcgaatttgagtcgcggctagggtttgtgcattttgaattagggggtttctaattacttagagattagctctgtttgggttgatagaagcgagtacagttggttctatttgtggcggctcctatacgaacagcgaatttcaggaaacattggtggattcgaagtgctccatcgacaaacgtggttgctcttatcaaattttagcaagtcggaggtatgagttgaaatattttgtctttgtcacaaatcattggttttagttctatgcatgcatctcagaaactcggatttgatgaactgtagtattgaaattcagtgattcccgaattgatttgtgtgtttaattctgtgattttttggttttagcagacatcaatcatttgtggttaaggtcggattgtagtgttaagttaagcgtgtatgtaatccagtttatcttaatgaaactaaaggaaagatgcttacatattgcatgtgtagtttaaccacctatatggtgagctattgaacatgtattgccaatttagattacatgatttgtataaatctgttttgggcatctggtaagcagcaaataagtgataatgttacctttgaatttcatagtatctgtcaaatgggggatgacgagttgccaaagcgcttgtttcggcttggggctgaacctgaaggtcgaaagaggataaacaaatattttacactttggtggattgagattataaaggctgcacttgatgaagagcatttgcaacaactggatggttcccaatttcggagtatcttgcaaatggggacgcatcagttttctataatgttcttgcattacattctatctacacagttagtgacagataagaagtacgagatgtggtggttgtttgttgggaaaccaatttgcttttgcattgatgattttgcgctagtaaccg

SEQ ID NO: 193873 - DNA, 258 bp, Arabidopsis thaliana landsberg
atgtcgtatgccctggtcgcgaggttggtgtcatatctgacagacaccaaggtattcttaatgcactgcaagagcagattcctggctatgcacccatgcaccacagatggtgcactcgacatctagcacaaaatcttcttcgaaaggatcatagcaaggctaactttcccctttttgaggaggtatgtctacagttggaggtttctcttttcgaggatacagttgaaggaactataaagatgcaacaaaatgttgaag

SEQ ID NO: 193874 - DNA, 42 bp, Arabidopsis thaliana landsberg
atgaaatccatgaagctcattgaaaaagtacttggaaagcag

SEQ ID NO: 193875 - DNA, 618 bp, Arabidopsis thaliana landsberg
ctaatggtgtcggtcaaccttccatgggaattagtggaagagatcctatgtagggttccacctcaatctcttgttaaattcagaaccgtatgtaagcaatggaattctcttttcgatgataataagtttgtcaacgaccactttgttcaatcacaaccacaattaatcttccgaaccgagtctaagatttattcggtagccgtaaatttcaaaggtccacggatagaggtccatgagttacccttagccattcctggtttgaaatctgagatgccgatacggctacacgactatgttgattgtgatggcttgttgttttgtactagctactttaacggggtcttgatttggaacccctggttgagacaaactagatttttcccatccatacatcgttatccagtcacatatgacataggttatgataacaaaaaacaatacaagatgctcgattattataaatgtgaaggtgactcatcaataaaatccataatttatgagattgggctatattcaaagaaagctaaagatttggagtctgatagtacttggccacttttccaatccaatagcgtattctctgaatggaaccttgtattgcgctggtgtagatgttaa

SEQ ID NO: 193876 - DNA, 420 bp, Arabidopsis thaliana landsberg
aaataaccgccaaatcaatcgtaggttttgctcttaccctcatccacttgtctcggggtcgtacctttagagaaacgcatgacaaatctgttgtcgcgtcttccacacgcgtggactccagacgcgcacgcctaagaggtttggtccttgtcagtctccacgcaccacgtaaccgtcgaacttcaagcaaaatcctaattcacgcgagcgggaaactgttaggggaagaattgggtgttaaagttcgctcttaacaaaaattacttataaaaaacgatagataaatatttattttatttattctataactaatagtctaaactataaacacagtttcttctttgttaacttttagacacactttttattaacaatccaaatattaatttcttatcaaatgaatttggcgatgttcgatga

SEQ ID NO: 193877 - DNA, 477 bp, Arabidopsis thaliana landsberg
acccgctacgtctccggcaccgccgagttctatgacggcatgctgcagatggtgcaccccgaccggatcgtcgacgagaagggcttcgccgcgctgccgctggtggagccggtctatccgctgaccgagggactggcgctcgggaatgtgcgccgcgccgtcgacggcgcgctcgccaagcttcccgatctgccggaatggcaggacgaggcctgggtcgcgcgcgagcgcttccctgcgttttcggaagcgttgcgcgcgatgcaccggccgcacgaaccgcacgacatcgcgccggataacccggcctggacgcggctcgcctacgacgaactgctcgctggtcagctcgcgcttgttctggtgcgcgcgaacatgcgccggcaggcaggccacgaacatgccggcgacggacacctgcgtgcgaaaatactgaaggccctaccctacgcgctgacgcagtcgcagcagaaggcg

SEQ ID NO: 193878 - DNA, 104 bp, Arabidopsis thaliana landsberg
tgtcgatgtaatacctgacatgaacaaagaaccacctattgttgcggacagagaaaactcgatagatggggaagaagaagaagcaagcagtcaagctactcaaa

SEQ ID NO: 193879 - DNA, 94 bp, Arabidopsis thaliana landsberg
atgagaggttttttccgaccattattgaccgttttcacccttacgtacgcgctcgtgctcgtggatcggatcgaccgaggcactcaatccgaaa

SEQ ID NO: 193880 - DNA, 709 bp, Arabidopsis thaliana landsberg
atggtgaataaagtttctcaatttggtctcttgggatggtttgggcgtgtcaagctgatcaactgtatatgtgatcttgtcttacttaatcctcagactggtcaggtgcgtacttcacattttatcactctttcttcagacttgataagctgacatatgcaatattaatctcctccttatgtttgagcttctctttgaactattttcatgaagcaagaaatgttcgtgcctcaaggttgcatgactctttttccctgtcaaattaccattggagttgaaaaaaaaaacagtttgttcagataagactattcctgttgtttggagatgaaaaattgaaatatattcttgcactcattacttgtagcgaaattgttcaagtaatgaagaaaaattacagtgtgtttataataaacaagtaaacaggcagttttcctgttttaccattaccgctagtagttttctttttgaaatttcacattagccggttacagctaaatattctaattggttccttgtggaattcttattttatttagtctcttgttgtacagtgaattaagtttgtgttttaatacagacaatgattgagcgacttctgttgatgctaagtgactctgattatcgagtgaggtttgtcttggcaagacaaattgggattttattccagacgtgggatggccatgaggcattattccaagatatttggtaa

SEQ ID NO: 193881 - DNA, 65 bp, Arabidopsis thaliana landsberg
aggttggatcgatgaagttctatcggcttgataactcgaaagtcttagcttggttaagttgtaag

SEQ ID NO: 193882 - DNA, 176 bp, Arabidopsis thaliana landsberg
cggcggcggcgcgcaacgaagctatgtccaagcgcaaaatcaaagaagagatgctccaggtcatcgcgccggagatctatggccccccgaagaaggaagagcaggattacaagccccgaaagctaaagcgggtcaaaaaggaaaagaaagatgatgatgatgaacttgacgaccag

SEQ ID NO: 193883 - DNA, 286 bp, Arabidopsis thaliana landsberg
atgcatcattcgctcgaacacatgttccagccgcagaatgtactggaacaggccatgaagatcaccaaacctggcggcagtgttatgatccgcatacccatcatgggtaattatggatggcagacctatggtgaatactggtgcggcatagatgcaccaagacatatcttcgtcccttctgaaaaacaaatgcgccggctggcggaagatgcaggattcgtgatcgaaaaattctattacgacagcagtgattacctgatctggagcagcgaacaatacaaaatgg

SEQ ID NO: 193884 - DNA, 237 bp, Arabidopsis thaliana landsberg
gtggccatcaaagacgttcccaccaagattgaagacaaagataacaacctcgagagcgaattcttccataatagacaagctttcctgaatctttgccaaggaaataactatcagtacgacactctcaggcgggcgaaacattcttccatgatgattctctatcatctccacaaccccactgcccctgcatttgcgacggtttgcaccatctgccaacaagaagtggaaagactctaa

SEQ ID NO: 193885 - DNA, 107 bp, Arabidopsis thaliana landsberg
ggggattcgggtctttcagtgtcgagattcatcgaagaagatggaaaaatccggtgtttgaagaggaaaagattgatagaggaaaacagagaaaatctttgttctaa

SEQ ID NO: 193886 - DNA, 102 bp, Arabidopsis thaliana landsberg
atgaaccgaaaactgagaatgggcatggtgggaggcggcaaggacgctttcatcggcgccatacatcgtattgccgctaatatggacgggcttatcgagctg

SEQ ID NO: 193887 - DNA, 424 bp, Arabidopsis thaliana landsberg
gtcaaacaggtgctgccggtcaccttcgccatcgtcttcggcggcatggtcatcttcatcccactaggtcttctgctcggagtggtgtgcggtcgcagccgcggttcacctctggaccgggtcgttgtcggcgtgtctcaggtcatcagttcgatgccctacttcgccgtggcgctcatcttcaacctctacctcgtcttcacctggaaggtcctgccggccaccggttacacgccgctgacgcaagatccaggcgcctggttcgagggattccttgctatttgggtgatcttcggcatcttcaactcgatgctctatgtgcgctacgtacgagcatttatggtcaccacgttgtccagcgacttcgtgaacaccgaaacggtcgaagggcatctccgagcggcgagtcgtctggggtcgtgca

SEQ ID NO: 193888 - DNA, 140 bp, Arabidopsis thaliana landsberg
actctggagggggggcccagtaccatctactggtaccttttgtgagggttaaatacgagctgggcgaaacaatggccattgctgaacactgtgtgaaattggactgcgctcacatgtccgcaccacatacgagccgctag

SEQ ID NO: 193889 - DNA, 412 bp, Arabidopsis thaliana landsberg
atgtcctcactggaagcaaaaagggaaagccgcataaagggcgcggtggattttatccacaagccggtggccatagagcagatgaagcagatgttcgaaaaactggaggacgcgatgagccgcagccctaaaaaagtactgatcattgaagaaaataccaagcacgccgaggccctggcttttttcctggagaccttcaatgttacctccaccatatcaagcagtgtgggtgaaagtgtggaggccctgcaaaacaaagaagtggattgcgtcatcatggatatgggcattccggccaaaaatgcctacgagacgctggagacgatcaaacaaaaccccgggctggaggaactgccgatcattgtgtttaccggcaaaagcctgtcggtgaccgaggaaagccacataaaca

SEQ ID NO: 193890 - DNA, 220 bp, Arabidopsis thaliana landsberg
atgagcacggtcaggcgcccggcgcgggtccggtcgggtcgcaccccgacgccactgaccacggcggcgggcacccgggccccgccgggcagggtcagccgggtctggaaggagtacgccgatctcgacttccgcaccggagtggtaggctacgccgagccagtgctcgtcgcgggcctgcccgtgggcctcccccgcgttaacggtgataccgtcgctg

SEQ ID NO: 193891 - DNA, 145 bp, Arabidopsis thaliana landsberg
atacagtaattttgagcgattacatcgtcaactcaaagaaatcccgaactaccatttacagttgcctccccagcgtattttctcatcaagccccgaagatgcttttgttcatcgtcgctgtattcagctggacaagtatctacaa

SEQ ID NO: 193892 - DNA, 117 bp, Arabidopsis thaliana landsberg
ttcaaacttaaacttatagcaaaaggagatgctttgtgtgtcgaaaatggcagtttcatcctctatagcacgaatccgttccttttaagatctaacttagtcatggagaagtcctag

SEQ ID NO: 193893 - DNA, 136 bp, Arabidopsis thaliana landsberg
ccaaaagtggcaatgaacgatttcccggtactgaaacgcgattacaataaaagatatgacctgtatcggcatgtaacggattcctgttccctgcaggacattcctgtggattacctggagttcggcgttttcgggg

SEQ ID NO: 193894 - DNA, 223 bp, Arabidopsis thaliana landsberg
atgtggaatagtgagcgtcacatgaagtttattgctgctatctccattttgggtgaagaaggtaagatttatatttcacattgaccaattcgtttttatttattcaagtttagtatactagttttttactctcttttaccttgcagattttcgtccaaaatccatattagagattatgaatgacccaaacttaactcatcgtcaagtcggtagccaccttcag

SEQ ID NO: 193895 - DNA, 144 bp, Arabidopsis thaliana landsberg
agaaagagagtgagggcaataaaaaaagctatggatttcgatttgaacggaggaaacaaacgagtcttcaacagactcggtggcggcggcggcgtcggcggcgggtcaactcgtccgatggcaccaacggatacaagacaaaag

SEQ ID NO: 193896 - DNA, 1169 bp, Arabidopsis thaliana landsberg
atgaagggaccgattcatgactcagccattacacttttagaggctgagctgatggcattgaagtacggtttaagcgaagccgtgactttggggatcaatcatatctcaatctgctgcgataacaatcagattttcgaatgggtaagtttcccttggccttcacgtctttgcttcaatcttataattgatgttttgctttaaatgttaggtcatggggagatccacgcctcaggaagaaaacattgccatgctaatccgtgatgtgcaaggcatcagaaaacagtttacttctagcatcgctgttctggtgactcgaaatcaagttgaatttgcctataaagttgcaatggaagcaatatgttttaagaccaagatagccttctctgtttcatccggtaaagatagatgtgcctgctctgtttcatccgaaaaagacttgcactatctgtttcgacgatgacatcaatgctgatatgatgttttatattgatcaatgtggtcatatgttttgttccgaatgtgtgaaacgacatattgaggtgagtctacttcagggaagtttgataacatgtcctagttataggtgcaaatctaagctgacttatggaagttgtgttaatattttgacacctaaagtaaaagagatgtggatacaaaggatgggagaggattcgattcctgtaacggatagagtttattgcccaaacccgacgtgctcagctttaatgtcagtaaccgagctcgatcaactcacaggaagtaagagatgctgtgtcaaatgcggtgaatccttttgcatcaagtgcaaagttccgtggcatgataacttgtcgtgcaaacgttacaaaaagttgcattcaaatcgtacaacaaacgataaacagcttaacgaactagcaaatcaggaaagttggcgtcaatgcagcaagtgtaaacatatgattgaacttactcaaggatgcgtccgcgtaatttgcaggtatcatctctaatcacatctcttttcgaatttcttttgtttcgaattgtatgatcacaagttactttataaattggcagatgtggacatgagttttgctatggatgtggagctgatgctggatgttgctctcatggtcatgtaccgtatttttcagttgaacgtcgagagccagaagtccaagcactag

SEQ ID NO: 193897 - DNA, 393 bp, Arabidopsis thaliana landsberg
atgccggcgcctaatgagacattttttaggcaaataccgctgggccttttgtgcggaaagccgcatcatcgccggcgtgagagacgggcaggaccggccgggaaacggaatttccgcgatctggcacgcatcctgcttcgacttggcatgctacgtgcattgaactgtgcagcgggcgtaaacctcgcgcaaacgggagaagcggagagacatcttctcatgaaaaagatcgaagcgatcatcaagcctttcaaactcgatgaggtgaaggaggctcttcaggaagtcggcctgcagggcatcaccgtcaccgaagcgaagggtttcggccgccagaagggccatacggaactttaccgcggcgccgaatacgtcgtcgacttcctgcccaag

SEQ ID NO: 193898 - DNA, 169 bp, Arabidopsis thaliana landsberg
attaagattattcggtttagactggttaagatcaacacaagatatcacagacacgagagttcagattggtcgtttacctttctcggcgattattttctggcggatcacctgggcagctcggcaaagcggttcaagctcacggtggcttgtcatgcaaacaaatcaatag

SEQ ID NO: 193899 - DNA, 85 bp, Arabidopsis thaliana landsberg
caatctgaccgttaatttttcccgaccaatccacgtcatcgtcacaaccgccgttggatccacgtactataatggatatgattaa

SEQ ID NO: 193900 - DNA, 276 bp, Arabidopsis thaliana landsberg
atgcagtgcctgattgatgtccgtccgcagcgcatgcaggtgatcgcgctcaatgccgtcggactgcgcctgttcagagtcgatgtcgaaaatgacaaaaccacggtggaacgggcgccaggcgtgcccgaacagatccagcccgagcagatcctgcgcgacatccagttctgctactggccgctggcggctttgcaggccggcctgaagggcagtgtctggcacgtgtcggagccgtttgcggggacgcggagactcacgctcgacggacggctg

SEQ ID NO: 193901 - DNA, 129 bp, Arabidopsis thaliana landsberg
atgccacagatcgatgaggcagaccttcctgaattgctggtgttccttgggaaccgtggtgttggcctgtcggctggcatcatcagcccttggaccttcacaaacaaacaagcaatcgaccgctcgaag

SEQ ID NO: 193902 - DNA, 202 bp, Arabidopsis thaliana landsberg
accatgctgccagggtcagccgctcagtcggagtcgaccgggggctcgtgtgctcttccgccgcttggcccacgggtacgtgaagcggcgacacccctgccgcttgcgtgggaccacggcgccgaagggaccgcgcggcggttcagggctgcagcacgacatgcgcgtctgtatccggttcctcggcctcgacctgctccac

SEQ ID NO: 193903 - DNA, 291 bp, Arabidopsis thaliana landsberg
ccaaccatcgccaacctaagcaacaccggttcaagcaaaaaggaccaataccaacaacctgtaaaccaactctccaataatcacaatccaaaaacaagaataaaaatgtcttcgcctgccagtgcccagtaagaagcctttccatcacctctcacgatgagttggtcgctaaccatgaccgctctcacaggtttagcagctccagtggctcgggttccgcttacacaggcggccaggccacatccactaacagcaccatgctcagccagtgggccgccacacaagaccgga

SEQ ID NO: 193904 - DNA, 252 bp, Arabidopsis thaliana landsberg
atgacgcgcccgatcaacgccaccacgtggcagttgcaaaccggcgaacaggtttgccacctgcggccggattaccgcctcgtgctgtcttcgctgacggccatgcgcgacgccgtcgtggccggcgccggtgccgccatgctgccacgctcgctggtgcgcaacgacatcgccgaaggcaagctgaagctctggggcgccttgcccgagcgccgcgtggaggtgtgggtcctgcacagctcgcggcggctg

SEQ ID NO: 193905 - DNA, 426 bp, Arabidopsis thaliana landsberg
atgggcatgcactatgtccgccttggcaaatacgaggacgccttgcatcatttcgaccaagtcgtcttctccgatcagaacaagggtcggacatcttcggtcattggctggcgcgccaacgttctcttcaaccttggcgacagcagagcagcgtttcgcgaaatcagtggtttgctggctcaggctaaccgtctcaattggatttggccctggtgtggccgtctggtcgctggcttcgggcgcgcgaacgtgagcaatgcccaccgagctgctcccttctggcaacgctacgtaacagcgaaccctgagcaccccgccggaaggtgggaacttctcatgacaacgctctatctgcgcagccagggggagaacatagggaaaagctacagcgaattttgtgaggattttgatcgccacatcgcccac

SEQ ID NO: 193906 - DNA, 200 bp, Arabidopsis thaliana landsberg
atggtgacggtgacgtccccttccgggataccatactgcatcgatcgcgccgaggtgacgcaggcgcagtacgccgcttttctagagtccacgaacggcgatgtctcggggcaggagtcgctctgcaagtctaccaaccttaccttcgagccgcagaccaccgagggaatgggtgaagatatgaaatgccccaagagctg

SEQ ID NO: 193907 - DNA, 112 bp, Arabidopsis thaliana landsberg
atgttgttcgatggagaaatacaatacaatatggatgcaagagttcttaatttcagtatgggaaagcctcgtgtacaattcaataccagtaacattgaaggtggtggagatg

SEQ ID NO: 193908 - DNA, 690 bp, Arabidopsis thaliana landsberg
atggtgttcctcatccagaacacccagagccgcgacacaacggccctgcccatcaagatcgacgagttgttgcgcaccacccacgcggcccaagacgccctgatggggttggacgagctggacgccgagcagttgcaaaagctgcgcgagacctaccagcgcatgggcgagagcgccggctccgggtatacgccccagggcgtgtccgaccaggagcaggccgaggacgaccctccgccagcgcgctgacacccacccgacctgccgaggagccccgccatgccaagccttcgcaccttctgtctctgatgcgccctgttgtgcctgcagggaccggccctggcgctggacatgccggtctcggcaccgcagggcttcgtcgaggccgcctccggcatcagctcggcggcgatccggagcggccagctggcccagcgcaagagccgcgctgcggatgtgcaggcctatgcccgggagatggtcggccgccacgaggaacagcgtgccgcgctggcctccctggcccacggcgagaagctcgccccgcgcgaggacccgggcctggcggaccaggcccgcgaggccctgctgggggtgcgcgaggcgtcctttgacgccgcctatgcacaggcaaaggtggcactgtacgagtgcgccatcgagcagtaccgcaatgccgcgcgcaacctg

SEQ ID NO: 193909 - DNA, 333 bp, Arabidopsis thaliana landsberg
atggcgacggcgctgctgcagacctcgcgggtggtggccatggcgccttcctgcctcgtcgtgttgggggctggctgtacagacagagagtgtgtgtgtggggtggctgccggtggtggaccggtggggctggagaggttcctcaggtgattgcgaagaggaacaccccgggtagctagctttataatggagtgtgatggagacgtgaacagtgtgtgtttcaccactctactagtggaatttctctgcctaggcacacgtacgcgcggctagcatatattgtacatggttcacatgtttcatgcgtgaaccaaacacaaaaacacaactccg

SEQ ID NO: 193910 - DNA, 75 bp, Arabidopsis thaliana landsberg
actgatcggacggacatcacgtgtatccatatttcttggctacgcgtgaccacctctcagagactatgccttcag

SEQ ID NO: 193911 - DNA, 129 bp, Arabidopsis thaliana landsberg
atatggaattatagacagttagactcaggtgctctgaaacatgatctagatgcctaccagattcgttcattctcaactggccgagtaatcagcccaacttttgctgttcgtactggtcctgctcgtatg

SEQ ID NO: 193912 - DNA, 485 bp, Arabidopsis thaliana landsberg
cgcctccatgtgtcacgtcccttcgtctgcacgtgaatctacgtcggctcatcgtcgtcaccaccgatcggaagctccaccatcgacgtcgacattgtcatctccgcctcgcacgctataggcggatcaaccgatcgagggcgaaccaccctcctgagacgtttgtcgtccatcgtgcgatcgtcgccaaacaagagggttgccgctgcatcacctcctcaggcaacaacatcgtcgtctgttatcatcctcgtcgtagcatctacacgccatcgactcttgtcggtgcacgtctctcgcacatggtcttctccaactgttcgagtcaccgacttcaagtagcgtcatcacgctatagtggcgctgtggaggatcttcttcctatgcgtcgtgactctcccactgcggcaactccaagaacctcgatgtgtcgtcatgcctacctcttcgccttcgtccagcacaaccttgttgccagcgtcgtc

SEQ ID NO: 193913 - DNA, 72 bp, Arabidopsis thaliana landsberg
cctgctgatgaatatgaatctctccgggactttgtcaccagagctccaaaaattagctcatctcgaaatatt

SEQ ID NO: 193914 - DNA, 980 bp, Arabidopsis thaliana landsberg
aatatgatgcttggctgaagagatcattgaaggttcttgaggcaggtcttttgttgcatcctcgtgtacctcttgataagacgaatagttctcaacgactgcgacagattattcatggtgctttacatcggcctttggagactggaaggaataatgagcaaatgcaaagtcttagatcagcggtcatgtctcttgcaactagatctgatgggtctttctctgattcttgtcactgggctgatggatctccgtttaatctcaggctttatgaattgcttttagaagcgtgttttgattctaatgatgcgacgtccatggttgaggaagttgacgacctaatggaacatataaagaagacgtgggtaattcttggaatcaatcaaatgctgcataacctctgttttacgtggcttttgtttagtcgttatgttgttactggacaagttgagatggacctgcttcatgcttgtgattctcaactggcagaagttgctaaagatgcaaagacaacaaaggatcctgaatactcccaggttttaagttctacactgagtgctatattaggatgggcagagaaaaggctccttgcataccatgacacttttgaccgaggaaatattcataccatggagggaattgtttctttgggtgtatcagctgccaggatattagttgaagatatatctaacgagtaccgtagaagaaggaaaggagaagttgatgtagctcgtaccaggattgagacgtacatcaggtcctcactacgaacttcttttgcgcaggcaagtatttgcattgtcgtggaggatgttcactatcgttttatttctatatttacagctgttccagcaattttcttgaacttatttctttgtgtttcgtttttctgtagagaatggagaaagcagattcaagccggagagcatttaggaaccagaaaaatcctcttcctgttctagccatccttgctaaggacattg

SEQ ID NO: 193915 - DNA, 274 bp, Arabidopsis thaliana landsberg
atgaaccgccggatattggattatgcgatgcagtctcatgcaaatccagttcttgtgtcgagtagagtcaaggatcgatttggtgagtttgtagatgctactggcgtgaacccagcttgttcaggtgttatggacctggataggtttccaagggtcttgcaaggtcaagaaatttgctcgcttaaatcattcccgcaatttgctggtttcagtccagctgctgctcctaatccctttgcttaccaagccaacaagtcaagttactatccgctag

SEQ ID NO: 193916 - DNA, 574 bp, Arabidopsis thaliana landsberg
atgttgatacaaaaatctctagcaggtgatgcagaagttgaagaaagaaacaaagacttgacatttcgactgaaatcgttccatctcggcggcgaactatcaagaaccttgcggaaaaaccgatccggcgtggtggaaactgaagagtacatagaagaacgagcatatgcgtctggagttctaatcatacctctctctggtgaagtagaagcagaggaaattcttggaaaccctagattttgattccagaggctaaacattctcagcgactgcccaccatatctcttattgttccttactgttctctccggcgacgacggagagtgagtgttttggttagttgaccaatgtggagccgtcgagttcatcggtggagacatcgcagctgacggtgacattgccggagaatccgagtgtgaagagatagagcaagaacagttactgtacggattgattctccggtctcgtgattcttgaccagctatagacgcgagaggcgagtaaaagtcgtcgtcttcttcttcttcatcaagattagcttcagagtgatgttgcaggaggaagctacgggcag

SEQ ID NO: 193917 - DNA, 432 bp, Arabidopsis thaliana landsberg
tgcatgacgaaaaaaatactgtacgccgctttactggcccttatcgtttttaccagctgcaaaaccaggtcgcgcaggatctggcaaagaatcgttaattcggaaaaagtagaagaagatgtgtatgcaagggattattccattaccaaggaaaatgcatacaacgatattttcctcgacagtgcagggtttgaaaagttcattgcagacaatgccatggtggacagcatttcggagaacatgcgcgacttctacaatatgcgcaactttgaatatgcatggttcgactcaaaaggtttaacagagcaggcacttggtttccgcagccttcataaattcaaaacagacagtgttaacaaaaaactggatcagcaaatggaccccctcccgctgcgcgatacaaaaatagacagcgcagaacctgtatcatgg

SEQ ID NO: 193918 - DNA, 160 bp, Arabidopsis thaliana landsberg
gtgcaccgaactgtccggtgcacaccagacagctcctgtgtaatgaccacaaaatcgctgattggctgctttccttctctggtgggtaccagattgttcgtggggggaccggactttccggtgacccatctgaccattgactccatcgacgtggcaccac

SEQ ID NO: 193919 - DNA, 225 bp, Arabidopsis thaliana landsberg
atgcattggaaggaaaagatcaaggaattcattggtgttcatatggagaggttgatagagaagcaagatttttggcttgagaagttgatgaagattgtggaagacaaagaacatcaaaggatgctgagagaagaggaatggagaaggattgaagcggaaaggatcgataaggaacgttcgttttggacaaaagagagggagaggattgaagctcgggatgttgcg

SEQ ID NO: 193920 - DNA, 219 bp, Arabidopsis thaliana landsberg
atgggtagaatcgcacgcgcgctcgatttgggaaactcctacaccgtcgggtggggccctatgccagcctctgggcgtccggtgtgtatccgctgacgcatggggccatgcacatagaaccgcctcctccctcgcgacgaacacggtcgtgtgacacgcgcacatcgcaaacgaatcgatcgagatatcgtaggaatccggcgatgcgtgctcgactga

SEQ ID NO: 193921 - DNA, 457 bp, Arabidopsis thaliana landsberg
atgctccatggcattggcttaaccgacgaggatatgaagttggcccaggttggcgtggcaagtatgggctatgatggcaacacctgcaacatgcaccttaacgatctggctaagctggttaagcaaggtatctgggccgaggacctggtgggacttatatttcacaccatcggtgttagcgatggcatgagcaacggtaccgaagggatgcgctattcgctggtaagccgtgatattattgccgattctattgaagccgtaaccggcgcgcaatattatgatggtttaattaccctgcccggctgcgataaaaatatgccgggttccattatggccatgggcaggttaaaccgtccgtctatcatggtatacggcggtacaataaaacccggtcactggaaaggcgaggatctgaacattgtttcggcatttgaagctttaggtcaaaaaatggctg

SEQ ID NO: 193922 - DNA, 1441 bp, Arabidopsis thaliana landsberg
tggaagggagtgaagaaacttggggagtagaagatgatgatgaccttactgaccctatttttgataccattgaggtcttatttcatcactttatatgtctctctctctttgattttaaaattggcttcttttttctatagatttgagattaacttctctttttcagggcaatggacattcagatccaacaagctgcttcgatgctgatttaagtgagtacaaaaagaaggccacagtaatcgttgaggaatactttggcaccaatgatgttgtctctgttgttaatgaactaaaggagcttggaatggctgagtaccgttattattttgtcaagaagttagtctccatggctatggatagacatgacaaagagaaagaaatggctgcttttctcctctctaccctttatgccgacgtcattgatcccccaaaagtttacagaggtttcaacaaactggtcgcttctgctgatgatttatctgttgatattcccgatgcagatgatgttcttgctgactttgtggctcgggcaattgttgacgacattcttcctcctgcgtttctcaagaagcaaatgaaattgctgccagataactccaaaggtgttgaggttttgagaaaggctgagaagagctatctagcgactccgcttcatgctgaagttgttgagaagagatggggagggactgataattggactgctgacgatgtgaaagctagaattaacgacttgttgaaagagtatgtcatgagtggagacaaaaaagaagcttttagatgcatcaaaggattgaaagttcctttctttcatcatgagattgtcaaacgagcactgatcatggcaatggaaaggcgaaaagctcaagtcaggctgcttgatctgttgaaagaaacgattgaggttggtctcataaactccactcaggtgacaaaagggtttagcagaatcattgattcaatcgaagatttgtctcttgacataccagacgcacgccgtattttacagtctttcatctctaaagcggcttctgaaggatggttatgtgcttcttctctgaaatcactctctgctgatgcaggagaaaagttacttgaaaactccagcgccaatgtttttaaagacaaggcgaagtcgatcatccgagagtatttcctttcaggtgacacttcagaggtcgtacattgtctagacaccgaattgaatgcatcttcgagtcagctacgcgcaatctttgtcaaatatctgataactctagcaatggacaggaagaaaagagagaaggagatggcttgtgtgctcgtctctactcttggtttccctcccaaagatgtcagaagcgcattctcgatgctcatagaatctgcagacgacactgctttggacaacccagtggttgttgaagaccttgccatgttcttagcaagagctgtggttgaagag

SEQ ID NO: 193923 - DNA, 1577 bp, Arabidopsis thaliana landsberg
cggtcgaactctaaggagactcgccacggagcgcttgttacgccagtcttttaaaggtcaaatcgccacgaaatctgcagcctttacgagtgagcgtagatcattcagcgtcgtctcgaagttcgaccttgtcacatgcttcaacggaaaagccgccgtcgctgaagctgccgttgaagtagtaactgtctccgccgcagaggagctgaagctgcagacaagagacctcaaaggccatcgcttgtgccggcgcatttttgaacggagagagagagagagaatcaaacgaccatttttaggttttgctctcggtggaaggaaagagggaaagatgatgattccgaggaaacggtaccgttttgtgaatttcagtctttcgaaatatacacttgcacagcctgccgtttctaggttaataaatactgcaaacatttgtcttaacatgacttgaaacagcgtgatgtattttattttcccgatgaacaacaacaggaaccaaattctcgccactgctctctcacacaatggctattgcagaagaagttactgtctttgctgagactagcttgggaactcgaatcgtcatggcggttcctctggatatcacagcagcagatttcaagagtaagctcgataccaccctctaaagaaattcccttttggtcttctctttcgaatgttgtttcccgtagcctactgttcttattaagtttttggtcttcctcggtttctcaatttcgaaacttagcttataggtgaactgataggattctctaattgaatctttctggatgtataatgtgttggtctgtgaggaaactgatttgcatgcgcatttcgggatgaaaattttcaaggttgtgaattcctatggtgagcactaaaagaaatgttcttttcacattgccttctgcatcattggtgtttgttttcttttaaagttctgtctattacacacttaaggactggcagggcacagtgcattgctcatttcctttgaatgtgaatcattgcttatatgttacttcatgacatcttgagatgagattggacatgtattgtttttctttttcttccttttgccttaaatttgaaggttaatgatctttcgtttgtgttacactttttatttaagaattcagagcatgtatcaatgcaaaatgctttctttttttttgcaggaaaactcgagaagacgcatgcaagttgcttatcgagcgtaggggagatagaagttcatggtctgatggtaatgaaaatgagctagcaattttattttctttctactcctgtgcttttgattttgttaacctcaaaccattgcagcaaactcattctaacttctccttctctcttagtataggttaaacgaaagtctcgcttttaccaccttgtggagtctgtgcctataaggtacatcttcctggataaccaaaagccttggtttatccatgcagaagctagagttgtaagcagatcacaagagtcaagcgtatctaacagtattgataaaacccacattagacattgtcacggttctgataactccatcgaaagagtcactgcattgatccaag

SEQ ID NO: 193924 - DNA, 69 bp, Arabidopsis thaliana landsberg
atgactcgtcgagattgtgtccgtccatttcttgatgcgattgtctcctcggatttgatgcatccatac

SEQ ID NO: 193925 - DNA, 167 bp, Arabidopsis thaliana landsberg
atgggatataaagcaaaagcatttggaaaagttagactggcccaaattgctctggttcatggtcgagaaagaactgaaagcggagcctgcgcttggggattgtttttttgctcctcatctgcagctgctgatcaaatcacagaaagaagatttgctaaaggacaaat

SEQ ID NO: 193926 - DNA, 300 bp, Arabidopsis thaliana landsberg
cccattttcccacatggaatcaatgttctctctcttttcacgggtattggtggtggggaagtggcacttcatcgtctccaaatcaaaatgaagcttgttgtgtctgttgagatttccaaagtctacagaaatattttgaaggacttttgggagcaaactaaccagactggagaattgatcgagttttcagacatccaacacttgactcatgacacaatcgcagggttgatggagaaatatggtgcatttgttcttgtaattggaggaagtccttgtaacaatctggcaggcggtaatagg

SEQ ID NO: 193927 - DNA, 162 bp, Arabidopsis thaliana landsberg
aagctttcgggcaccgaaacgattctcgtggtcgaagacgaaatggttttacagaaagttatctgccgatcgctcaagcggcaaggctaccagattttaacggccgccaacgggattgaagccctggatctgatccaaggttacgccggcgaaattcacctg

SEQ ID NO: 193928 - DNA, 848 bp, Arabidopsis thaliana landsberg
atgagcgatgggggtgtcgcatgcatgcctctactgaatatcatggaaaagcttccaattgtggagaagacgactctttgtggaggcaatgaaagcaagactgctgctactacggaaaatggtcacacatctatcgcaaccaaggttccggagtctcagccagctaataaaccttcagcgtcgtctcagccagttaagaagaagagaattgttaaggtaattcgtaaagtggttaagaggagaccgaagcagcctcagaaacaagctgatgagcagacgaaagaccagccaccttcccaggtagtgcaactccctgcagaatcacagttgcagattaaagagcaggataagaagagtgagtttaaaggaggaactagtgggagtaaagaagtggaaaacggtggagattctgggtttaaggatgaagtggaagagggtgaattaggtacgttaaagcttcatgaggatttggagaacggtgaaatctctccagtaaagtcattgcagaagagtgagattgaaaagggcgagattgttggggagagttggaagaaagatgaacctaccaagggtgagttcagtcatctaaaatatcataaagggtatgtggagagaagggatttttcagcagataagaactggaaaggaggtaaagaagaaagagaattcagatcatggagagatcccagtgatgaaattgaaaagggggaattcatcccagacagatggcaaaaaattgatacaggaaaagatgatcatagttatatcagatctcgtaggaatggagtagacagagagaaaacgtggaaatatgaatatgaatatgaacgtaccccgcccggtggaag

SEQ ID NO: 193929 - DNA, 345 bp, Arabidopsis thaliana landsberg
gctaataaaacgtctgtagcgccaggcggcaacgagtatttctttgtgaaatccggcaaggtgttacgaaagatattgctgggagaaatacaatatttcgaaggggaaaaggaatacgttcgcctggtaaccccaaatgaacaattgcttatttatcgccgcttaaaggaaattgatgaacagctcagcccgccgtttgtacgtgtgcacaactcctatatcgttaacaccaggcaaatcattaaaatacaggataatcatatttatatcggggccaaacgtatccccatcagcgaaaagtttaaggataaatttatggcggtaataagccagcgtattttttga

SEQ ID NO: 193930 - DNA, 213 bp, Arabidopsis thaliana landsberg
atgggtcttatgttacatacaaaggcaaaaagtttaatagaaattgaaatgtattccgatgcagttgaagttcttgctatggcagaggttagttgttttttttgttgcaagtacgtttttgttgtggtaatggttctgcaatagcttcctgatgtttgtttgtttggttgttcgtaggaatcatttttgctctgtgatcccaagattctcgag

SEQ ID NO: 193931 - DNA, 34 bp, Arabidopsis thaliana landsberg
atgactcgagaagaacctgggctaccaccgaaag

SEQ ID NO: 193932 - DNA, 88 bp, Arabidopsis thaliana landsberg
atgcagccgccgctcctcgccatcgtcgtcgttccgtccgccagcttagtcacctcacccgacggtgatccccctcgtacacgtgtct

SEQ ID NO: 193933 - DNA, 636 bp, Arabidopsis thaliana landsberg
atgcgtctcatcctgcggtacctgttcttgaccaggggggatgtgagtacaacaagggtgagctcacatacgttcatcgctcaacaagttgtggggaataatgtgcatgaactcaccaaaggtgggagctcatgtaaagtgtaaggcttaccaaaggagatggttaaagctgagcattgcttttaaagttggtcaaagttttattagtaattactaagtataagtagataccaacccaaataagtagtagaacaaaagtaataacaacacctgcgatgcaatgcatatgacaaattaagtttagttccataaattaatcatgtgagggtccgagctgctcatgaccgtgagcacagctagtataccagttttacactctgcagaggttgcacatctttacccacaagtcatgttacccatctaccaagagaaggccaatcccatacacctctaccgaggaggtgaggcagggcaacactacgaggcatttacaaagttccactagcttcagaaaacccgctacagtttatgggaagatccagtacagggttcctggctgaccgccatcgcagcaaaatcaaccagggacctccctacactgaccactcccctactgcccttgcccctttcgggtaa

SEQ ID NO: 193934 - DNA, 131 bp, Arabidopsis thaliana landsberg
attttactattcgactcgatatatatcaactcaaaaaatttattttagaattcactcaatatggagttgttatgaacgcaaccgaaaccggaatcaagtatattgaaactatttataatgaaaataaatga

SEQ ID NO: 193935 - DNA, 337 bp, Arabidopsis thaliana landsberg
ggtcctgataaggacaaacgcaaagatgacaaagaagagaaggctaagaaggtttaaatcattgtctgaattgaaacatattgtagaaatcagtaagtttgcttattgatgtgtttcctgattgtaaacaggctgtgagcatcaatgagtttctgaagccagcagagggtgggaactactaccgaggaggtcgtggtggccgtggacgtggtggtcgtgaccgtggaggtgtttctagtggcgaatctggtggttaccgtaatgacgctgcaccagctattggagatgctgctcagttcccatctcttgggggcaagtcccatccacccatgataac

SEQ ID NO: 193936 - DNA, 174 bp, Arabidopsis thaliana landsberg
cccatatgcactttgccacccgccagcccactcctgctctagcgctggcgtatgggacccactgtcagccctatcatcttcctcaagtccgaacgggggcgctaaaacagaattccgccgagatcttcgccgctgcgttcgtcgaacggtctctccggatcgagccctactccg

SEQ ID NO: 193937 - DNA, 1006 bp, Arabidopsis thaliana landsberg
atgggagggctggcccgtggcgtgcttgccgacgcgcaccatgccgctgccgaagcctatgccggtttcgccgacttcgcgctgtggcggttggcaccgcagggtgcccacctggtggcagggttcgggcgcatccgcgacctgcgggcggccgcattgacgcacaccggcgaagacgacggcgagcgcgcggtacggtaacgcagtcgctatttccctaagcgcatcaccgccgccgggcgctgattcgcaccatggagtccttgccttttttcgcccttttgcctagttgaacaaaatatcaaactcgaccacgctgacacgcgttacagtccgatggagccgtcatccgtcgttgacctcaagtaaactcccgcgttgaggaggggtgccaatggaacaatccggggtgtggaaccatgcgcgcggcgcagaggcgttcgggttcgaggcgctcggcgccgtccattggaacgatcgccggcccatcctgatcgaggaggcgaatgttcagagataaggccaggctttattcgtcctggaatgctgcctgcctctttgagcgtggatcgcacttgcctatgaactcttgagtgtctttatacattgtgggccaccatagacctacttgcaacactttttgggcggtcttaaaagtagcgaaatgccctccataggtggagtcatggcaatgttccagtataccctgaacttctccttcagagacacacctcctgaatagcccatcatttccctttttatacaggtatggttcatcccaatagtaatggtgtatatctctacataacttcttctttttatatgcatccagactctgagatatcataccacttactaaataattgactaaatctgcataccaggacaacttttcttcttcaactgcatatgcttcatccagtatgtcctttgtgctgatatttttgttaacaaggtcgtaaaacatcaacttttcttccggcatagtgtcatctatcgggattga

SEQ ID NO: 193938 - DNA, 681 bp, Arabidopsis thaliana landsberg
ggtactgattcaggcgttgacacgtattttggtttgtgcacttatcctggtcaggagctacggcgccgtatcgattttaaggtaacacctgaaaactcctaatgtcacacaatgcaaaaaagaactaagtgggttagtcaaagataaaaaggacaataccatgattgattcagctatgtctaggttgatctcttcccggaagatcattcaataaatagtcttttttcataggtctatccaagggatatctattcgtttggactcatagcctggacagggaacgacgtgttgaacagaaggtatggatatgatttcatttgtatacatgtctcactaaacacatttgttggtagataaagaacacagcatatgtatatatatatgcgatgataactgcaggctgagattgctagcagaatcgaaaggatatcgacttgacgacactggactattcccagctactcacagttctagtggtaaccgggtaagggagggagaaaagtgaattaacttgatgtgaattcttgggttttaaagtgaaagaatgattatgttgaagctgtgataatgtttgtctctcagggtgctagaggaactgcaagtctgaaactctcaacggagaaacaagtttttgatttcttaggatttccttggctcgagccacacgagaggaatctctaa

SEQ ID NO: 193939 - DNA, 341 bp, Arabidopsis thaliana landsberg
ggcaaggatgaagccgaacgcgccaagagccacaaggaactggccaaggaatactggggcatcgacggcgatgcgcaggcgttttcgcgcttcatcacgcagtttctttcgcagtacggtcgctggaactcgcccaagttcctgttcggcgaaagctacggcaccacgcgttcggcggtgctggccaacgtgctgcagcgccagtacaacgtcgacctcaacggcgtgatgctgctgtcgcaaatcctcaacttctcgctcagcatcgacggcgccgacatgaaccccggcatcgacatgtcctacgtgaccgcgctgcccacctacgccgtcaccgcctg

SEQ ID NO: 193940 - DNA, 168 bp, Arabidopsis thaliana landsberg
agattgaattacctacctgacttcaagtgcttgcgcactcatcatgatacaagaacgaacaccatggaaaagctaacgatcatcgatttcaagaatcactccaactatctgaatcttcatccttgtcgcttccagccattgcctgcaccagtgttcaaccggttttag

SEQ ID NO: 193941 - DNA, 226 bp, Arabidopsis thaliana landsberg
atggctgccgcactgagccgtgagcggcccgcgctgacgcactccagcacggccgggcgggtcaccgacatcttgcgcacgcacatcatcgagggactgttcccgccgggcacccggctgtcggaggaggccatcgggcgcgctctcggcgtgtcacggaacaccctgcgcgaggcgttcgccctgctgtgccacgagcggctggcgatccaccacatgaaccgcg

SEQ ID NO: 193942 - DNA, 914 bp, Arabidopsis thaliana landsberg
caacggctacaggaaagcagaagagcagctcatgtcctaacaccacaaacaacattacaagagaagagatcagaagatagtcaaggggagagcaaaagtggcaaattcacactacaacagctgtttcaacaaacaagggtcgctgatgtaggaacgatgaacatagcaacagagttcacaagagattttgcaaattcaagattagaagaaactatgatactcacacataggttctccaagaacattttcagaaccaaggagctttttgcgtgcaggacggttcagatgttaggttcaggaattgtcctaggtctgatttttcataatctcaaagacgatttaaaaggtgcgcgagaaagagtcggcctctttgcattcatattgacctttctgctaacttcgacaatagaggcactccctatatttctgcaagaaagaaagattctgatgaaggagacctctagtggaagctacagagtgtcttcatatgccgtcgctaatggactagtttacttgccatttctgctcatcctagctattctattctcaaccccagtgtactggctggtgggactgaaccccagtttcatggcgtttctacacttttcgctcctcatttggttgatcctctacacagcaaactcggtggttgtgtgctttagtgcactggttcctaattttatagttggaaactcagtgatttccggtgtgatgggttccttctttctgttctccggctacttcatatcgaaccatgagatccctggttactggattttcatgcactacatctccttgttcaagtacccgttcgaaggatttctgattaacgagttctcaaaatcaaacaagtgtttggagtatggattcggaaaatgtttggtgaccgaggaggatctactcaaagaagaaag

SEQ ID NO: 193943 - DNA, 264 bp, Arabidopsis thaliana landsberg
cgcggcatctgtgttacgcatctcatcagatcggtcaccagctgctccgaagttcagaactggttactggaaagtttctttactgatgtaattgctcggactactgtaaatacagtagaagttatagccacagccagattaaagctgcagaagataatgctcgaccgacgaccaagcgacctaaaaagaattttatatccttatacagaaacaggattcatagaggccacggggcattttatcttactgctactaaaattggag

SEQ ID NO: 193944 - DNA, 202 bp, Arabidopsis thaliana landsberg
atggcaagtcctagatttaattccatcatcatcatcttattcatctgcactataagcttatcgatcgtctccatttcttgcaaagaagatcttaaaacgaaccaagccgccttgtttgcgtttggagattctctgtttgaagccggaaacaataattacttcgactctgtctcaaagttccgatcaaatttctggccgtatg

SEQ ID NO: 193945 - DNA, 286 bp, Arabidopsis thaliana landsberg
ttgtgagaacctagggacaatcttacacaagaaggaagaaggagcggacactcaccagggatatgcacccgcgctcgaggcgcatcgagggctgggtaagagcaccgacgtccagctttcctaccgtgccggctacccgcctgtagatgtcatcggcggggagggggaccgaggacatctgcgaaccctccaagtcgacccccgacgtcatctccgaaagcggcagcgcccgtccgccaaggtgagcaccctccggcgatggatggcggcaaccacccccgcggcg

SEQ ID NO: 193946 - DNA, 989 bp, Arabidopsis thaliana landsberg
atgattggaaacctggagaatcagctaaccgagatgcacgatgagaacgagaagctaatgagtctgtacgaaaatgcgatgaaggaaaaggatgaattgaaaagacttctctcttctcctgaccaaaagaagcctattgaagctaattccgatactgaaatggagctgtgtaacatttcttctgaaaagtccacagaagatttaaactcagcaaagctgaaacttgaactggcgcaggaaaagctttcaatatctgcgaaaactattggagtgttctcttcgcttgaagagaatattttggacatcatcaagctgtcaaaggaaagcaaagagaccgaagaaaaagttaaggagcaccagtctgagctaggatctatcaaaactgtttctgatcaaactaatgcaagaaaggaagttgcagagaaaaaattggccgctctcagatgctcactatcaaactttgcatcatcagcagtttactttcaacagcgagaagaacgagcaagggcgcatgtaaactcattttccggttatctaaaccagaaaaatgaagaactcgatgttatccgttctcacaaaagagaaatcgatgctgctatgggtaagatccaacaatctgaggcagagctgaagagtaacattgtaatgctgaaaataaaagtggatgaagagaacaagaggcatgaggaagagggtgttctttgcacgatagataacattctgcgtacaggaaaagccacagatttgctgaaatcccaggaagaaaaaacaaagctccaatcggagatgaagctttctcgggagaagcttgcttcggttagaaaagaagttgacgacatgactaagaagtctttgaaactggagaaagagatcaaaaccatggaaacagagatagagaagagctcaaagactagaaccgaatcagaaatggaattggagaacacaattcaagagaagcaaactattcaggagatggaagaacaagggat

SEQ ID NO: 193947 - DNA, 629 bp, Arabidopsis thaliana landsberg
atgcctgactgtactagtgtattcatcgaggctttagtccttccgtgggatctcatttgcactgtgaccgaagaagaggcagctgctcccaattttgaagaacatgatacttcccaagaaacacgtccacataagagatgtaaaactaataatgggctacagagtgaaagctttctatctgtgccacatgaactttcttgccagatgaccatcagatgtgctagtagtcactgcttggttgcaacagcaactctttctaatttgacggagaacaaaagtggtaaaatgcacagtgctatgcgtgtgctgttagaattcatacctgaatgcagtaactattatgtaagtattaatttcttattaacattggattcccaggaaacatctatgctgcacagagactaatagtataaactaaatgatggttttgcattttaatatggcaggggttacagattggcggttgctatttgatgaagcatggctctgatgattccttttgtgttggacggtctggcatatctaacaacgataaaatcaattttagaccagaaacacgtttatggagtctggaattttcttttgacgaagttctcacccatgatggatctatggatgtacatcctctg

SEQ ID NO: 193948 - DNA, 380 bp, Arabidopsis thaliana landsberg
atgtggaccggcgaccggccgggcagagtcattgaccttgaccataaaataatgcgccagagaggtgcgttgccatccgttgcgtgcgtctcaaccagacatgacacgagacaacacgagagtaaatgactgaatgaattcgtgctgcatctaggcaggcaggcgttgcatgcattgctattcagtccagcaagcccatgccatgaaggcatgaatacatgatgcatcacatgttcacataataaataaagcgtgtagctacgacatgcacactggacgtacgtacgtacgtgtgtctagagagacagtgcatgaatccaatgatgcgatgcgcggccttgatctcgatcaaagcagctcgtcgctatagctcgatcgta

SEQ ID NO: 193949 - DNA, 890 bp, Arabidopsis thaliana landsberg
atgaagaataagaagaagacgaagcttttgcgttttgggagttcgaagagtttcaacagtgtgacgcagctgcacaatacgttttgcgtttcgcgtttgaacaaattgaatttgatgttaatggacttaagatttaaagcccatattagctcattgggcttagaccaaaatattctgcccgttatgacagatgtacaagtagccgcttgggtcacgtaatagattttagggctaaagtcaagtagggtttcttcttcatatgctaaattgcgttcccttaattttacatagtctctacttcttgactatatccaatggcgattaagtggaaatgtaaagctattcgcgtcgtagcctcctcctcaggaaggtgagtgggaaattttaaaacctttttgtagattttggaattgatagggtttctaaattccatgaatttgtgaaactaacgccgaagatccttaagctagcctatgagcagcaaatagaagtcagaaaatcccaatgactgcctttattaagaaggcagtgtatggattggaagatatttgattgatgatgatgatgttgatgagcaatctcaagagtttcagatccaacttaattaccaggatatggccactgaggaagaagaaacgttacttgatgcattattttccaaggatggagcttcaatagctaaatgtctctctaatgttattaagcgtgaagataaaggtgatgcatgctacatgtttcttgatacctagctatttctgtgttgtatgattatgtggctaattatatcttgatggatggttatgtatatcttttgcgtgttgaaaaagtttcagcttctgttacagaaactaattccatgtccatgtctgaagataaaggaaatgctacag

SEQ ID NO: 193950 - DNA, 473 bp, Arabidopsis thaliana landsberg
atgaatcttcgtgccaatttgatcacagaattccttgaaagtttcggcatcaaattgtgttccattgtccacagttatagccttcggacgccgaagcgacaaacaatgttttgccagatgaatttctggactgtgaccgaagttattgtggccaaagcgttcgcttcaatccacttagaaaaatattctactgccaccacaacataccttaaattgccttgtgatggtggaagtgggcctagcaaatcgaggccccatctttgcaatggccaagtgggttgtattaactgagtgagagatgaaggttgcttctggtcccttgcacatttttgacaaccttcacatttttggactagctctactgcatccgaagctgctttcagccagtaaaatccttgtcgaaaaacttttcccagcaagggcctagacccaatgtgagatccacacagacctgcgtgtatctctttcattaa

SEQ ID NO: 193951 - DNA, 102 bp, Arabidopsis thaliana landsberg
aatttggtcgaacatgttggacgagatttatttgagattagagtgggaattagaaaggaatattcgactataatgattgtatgcaaacggataaaacaatga

SEQ ID NO: 193952 - DNA, 135 bp, Arabidopsis thaliana landsberg
atgatggctgctggttatactttggatgcaactctgtgttacatttgcgcaggcaatgtcgacaaaacagtagacatttggtcaatgagccttgaaaaacaaagtgctgggaaatcttatgctgagtgtgttcaa

SEQ ID NO: 193953 - DNA, 223 bp, Arabidopsis thaliana landsberg
gttttttcaaacgacaaaagaaaaaacagagtaagtgaatgaaaaggagatgatgcatgaaaatgtttaaaggacacagattattgatctccttgtttcctttggctccataggcgattagacatatatagtaccacgactacctttacaacagcaagagagaacattcgacgatgtaatgcatgtgactggtcggttagaccggacagtcttcatggagcca

SEQ ID NO: 193954 - DNA, 562 bp, Arabidopsis thaliana landsberg
atgatctccggtttcattaccgatgcaatcggaacacattcagtctttggtgcttttgtgtttggtcttgtgattcccaatggacctcttggtctaaccctcattgagaagcttgaagatttcgtctctggccttctcctacctctcttctttgccataagtggtctcaagactaatatagctgccattcaaggccctgccacgtggttaactctgtttcttgtcattttcctcgcttgtgctggaaaggtcatcggtacagttattgttgcgtttttccatggaatgccagttcgtgaaggaatcactcttggactactcttgaacactaaaggtcttgttgaaatgattgtacttaatgttggaaaagaccaaaaggttttggatgatgagacatttgctactatggtacttgtggccttggttatgactggagtcattactcctattgtaacaatcctttacaagccagtgaagaaatctgtttcatacaagagacgaacaatccaacaaacgaagccagacagcgagcttcgggtattggtttgcgttcacacaccgc

SEQ ID NO: 193955 - DNA, 920 bp, Arabidopsis thaliana landsberg
atggcttctttcaaccactcttggctctcttctccactcaccgaaactcccactttcttttttcctccatctccacacccaaaatccttgaaactctcacttttccgaactcggagcaactcgtcctcaccggaccgctcgtcagaggttgagctcgatgtggatccggtgaagctcgcattgaagaaagccgaagcttataagaaatcgaaatcagagcaaaaagaaccagagaaaaacgccggcgacgaggaattgccgctctctgttaaggctgctatgcaaaaagccaatgcttataagaaaaggaaaggacttggaactgatgcagtcgcaaaagctaaacccagttcagtaaaaaaatcatcttttgcacaaaattcttgtaactgtctttgcttgagtttgtagatcaatgcacttttccaatagtctttagtacacatcattcatgtgtctttcgtggcctgcctgttccttgaaaagattgttttttgattagattaggagtaaagcctttgaattttagctgtattaatggagaattgttctgatgggtttcaggtaatacagagcaaagttttgttagattaacaaataaggttgttgaagataatgatgttaagaagaaagaattgaaagtctccagcattgatttcatggggcttggctttgctgataagaagagcacaagggggcttccagcgggacttgttcctgttgttgactatcttcctgaaggagacttacctgaggtggagtttattgttggtgataaaacaagatttgcggagaaagtaaaggaggttgagcaagaaggagatggaaactctgatgtgtataaacccaaagtttctacatggggagttttcccaagacctagcaacatctctaagacggtatgtgactggcccatctaa

SEQ ID NO: 193956 - DNA, 55 bp, Arabidopsis thaliana landsberg
atggatgatgttgatcgattgtttcagtgtttcaagtgtgggatttctccgcctg

SEQ ID NO: 193957 - DNA, 1402 bp, Arabidopsis thaliana landsberg
atgcatgtgacaataaatgtgggtaattctggtaagcatgagtgaaatgtggtataattgtaagacacattgcaaaaagtggtagattttgtaagattcccttttataaagtggggagaaagaaaagtgaatgaagagagaacaaaaataaaggttgctaaccatagttagtttggattggttaggttggattgagggtgtagtgataaaaaaaacttagaaaagtgtcaaataatactccataaccaaattaagtttcaaaaaaatgcccatagcataatatttccttatatatatatatatatgaaagtattatatttttttgcaaatttagatgaaaaacttattacatgatccaaaaagtattggataaatattctaaacatatttatgtactatttgatctgtaaaagttaaatggtggtgaaggtatattttcctaacaaattagtattatgattttcttattatataagtgtctctctttaacaaactttcctaagttgagtagcgaaatcatttttccatctttgacttcgtcttctttgttgttcttcttcaagattctttgttactaacatagtatcaaagcgttaagcttttccgatggtgactactcgtcgaattggtcgtcgtgttacttaagctacttcttcggtttgtcgtacaactattcgcgatgattcttcaccagaagctccgacttcacatgttcatcagaatcatattctctgattctaaccaaatcgccggttatcatctatacgttcatcatgatctaaataagttaacattttttttttttctcttcctatttttttattgggaaagttatcctttttcacacgatttacaaaaatggaaaagtcttgaaaaaaataaaacaaaatcattaagacctagtcaagtctcccttctatttatctagagtaaaatttgcctagtttgttgataaggttcttcgattagtctcacttcatcttaataaacagatcgacgccgtcactctgcaaacaatcttcatcgccgaatcacttgcctacaggtatgactttgtgcttgagtactttagtaatcacgattaattatatctctttgtagaagttaactaattcccgattataaattagatttactgattcttagatatttataagatttatttgctattatcacagcagtgattgattaaccaagatatttgtgatcttctagttggtgcatgcatattttcaacaaggatcttcttattaaattcatattataacgttacatatacttttcagaacaatattataattattgtaaaattttgttttcttaatacattaatatatttgaacttaataatcatcacttcaaatacttttcaggtagctatgatgataaaattgatgagtga

SEQ ID NO: 193958 - DNA, 148 bp, Arabidopsis thaliana landsberg
atgaacgaaaaggagggaaaaaaaacacaaagcaaaaaagctcaattgcgactaaatacaaagtgtatgagtactaagccgcagacaaaccctaagctacattttgtggtgaactatacgtctatacgtctaaaccgaaagcccaaag

SEQ ID NO: 193959 - DNA, 776 bp, Arabidopsis thaliana landsberg
atggagatgttgaaatcaactgatcagtctcacttctcttcttcttacgacgattcttctactccttatctcatcgataacttctatggtaacaacaacaaacttcaaaaatcccttctttaccaaatgacgtatatatataggctctgttgttagccgacttatcttcttcaacacaagttgcttacagcctcctttctcctctttttctcggttgctgaatttgtctttttccccacaaaggaaaacaaaaatacagaagaaagcacaaaaagattagatttttataaattttaggaactaaaaaaagagacgtcttttgattttgctcctagtgtgattttcaggtgtgttggttagttaaagttgctaacttttttgtttgtttgttttggtttaagctttcaaagaagaagctgagatagaagctgctgctgcttcaatggcggattcaacaaccttatctacttttttcgatcattctcagactcagattccaaagctggaagatttcctcggtgattcctttgtccgttactctgataaccaaacagagacccaagactcttcttctctcactccattctacgatccacgtcaccgcaccgttgccgaaggagttacagggttcttctctgatcatcatcagccagatttcatgacgataaactcgggaccagaaatcttcgatgactcaacaacttccaacatcggtggtactcatctctccagtcacgttgtggagtcatcaacgacggcgaagttagggtttaacg

SEQ ID NO: 193960 - DNA, 61 bp, Arabidopsis thaliana landsberg
atggcagtggcggtccgcccaaggcacgcacgaatggtgtggccggccagcgggcccgccg

SEQ ID NO: 193961 - DNA, 1292 bp, Arabidopsis thaliana landsberg
atgatagagaagaagacaccatggaacaaaaatctaacaagtcccaacttctcgaacctctctaatgtgcgtatagaagggtgtgatggtttaaaggatttgacgtggctgctgtttgctccaaaccttattaatcttcgcgtttgggggtgtaagcatctggaggatttaataagcaaagagaaagctgtgagtgttttagagaaggagattcttcctttcgcgaaactagaatgcctgaacttgtatcagttgtctgagctgaagagcatctactggaatgctctaccttttcaacgtttgagatgtcttgacatactaaacaattgtccgaagctgagaaagcttccgctggattctaaaagtgttgtcaaagttgaagaatttgtcataaaatacaaggagaaaaaatggatacaaagagttgaatgggaggacgaagcgacaagacacggttttttaccttcttgtaggctgcgttgaggagccccatgacccaaaaatttgatgtgaatgaatattatgagtctcagttctcttacgtagaacttgatgtggtggctgagacagctccgtctactgaggtggatgactagaacccgcaaatggtcatctgaccatgggctaagcccagtccacaacattatggacaatccatggtcggcccgtaatgaaaacgggctatatggtctaaagactaattttatccatgggtttaatgggctagcccacacggtttatggttggcccatcaattttttcaacacatcaatttttttctcttctctctctctcggcaacgacgctctctctctcggcgacaaagctctctctcggcgacgaagctctctctcggcgaccaagctcgacctctctctcaactcctactccggttagttctactagcttgtgggtttgtccaaatttcaattgttgatgttatggttttataaatagagcttttaacgagattgtgtgaaaatgcattatatataaacatcattgtatgggctggccatgggctgaccattggacaatgggctgaccattggacaatggtctttagtggtcttggacaaattttcagaccattgtccattaaagaccaaccaataaaacccataaaaaaaatggttcaagtggacatgaccaatgggctttggacagcccaattgacacttctatccatgtcgatctatgcagagatgcgtgtaatcagaagtcaagttgacaacaacccaatgacaaataaaacatttaatgatcaacagattaagtttacaaagcgataa

SEQ ID NO: 193962 - DNA, 180 bp, Arabidopsis thaliana landsberg
caaagagggaagcagtcagctcagcagtccatccagacacttatactcgatcacaaaggagaggaggtagtcccaactacaattcaactcgatcgaagaggcgaccaggcagtccactttgccagttcaccagttctacttgatcgcagaggagaagaaccagtccatcctgacagttga

SEQ ID NO: 193963 - DNA, 145 bp, Arabidopsis thaliana landsberg
ctccctgaatgtcaacttgatgctacttggcatgttggatgagtctttgttcgacaagacttactcctccatcttggcatcaagagtactcatcgaagcttattaccgtttcatgcagaatttgactttttgctatgggcaatag

SEQ ID NO: 193964 - DNA, 280 bp, Arabidopsis thaliana landsberg
atgcaggttagtcttgtccaaccctgaaaagtataaggcttagccttaaatatgtgtccatataaaatcgggctttccgtctaagcccgtttgggctaacgggggttttagacttagcccgatcagactcgggcctatcaagataattggctggggtcgtaatgccttcgagagcaaaagctgttctgcttgtcatgttgctgccagttccgtttcaaggaagctgctgttccccgtttggattgaaggaagtcgacaagcaacttccgtgggcttttga

SEQ ID NO: 193965 - DNA, 786 bp, Arabidopsis thaliana landsberg
aaagagggatgtgcttctctcttgcccatgaaagagatattgcaagtgtttcaagcttattaaagcaagaagagctctcatcagatatgcaagttaaagctcttcaaatttttcagaaggtacttcataagccaaatatttttatttcttttgcaaattgacgatgcttacttaccgttgatgtgaatgcagatagttgtctacaaactatgcatgactgatgcatctgaattacttcagctcatagctattactgagaatgcatctcattctcagatcttttcaagcagttgtttagccatcagtgtcttggtgagtatatggacagaaatagttcggacagcggaaaaaagatcaattgagatatcttcaacatctcttccgatgcagctcgttgtattaatcatggacagggtcgccttgctggggcgattatgttctgatctttttcgagctggctatgctgtagttagtgaggttcaagacctcttgaaggttctccacctattagtaggaaaacgttctgaactgagactgctagttcttgaaaaagtcagattattcttaacgtatattgtgagcctaaatgatggcttaagaaaagcagatggagctcatgaattgctatttggtgttatcaattataaagacaaaagaggggtggtcatgaggtcagagtttctagcatcaatacacaagttcctgatagtgttcttggaaaatctcgagggagatgataatcttttgtctgaaatttatgaaaaggtgaagcatatcactgagttt

SEQ ID NO: 193966 - DNA, 1043 bp, Arabidopsis thaliana landsberg
atctacgcacgtgggtagctccatccgagatccgcggggatattctcctggatattcggcaggttagttccgagatatcaggtccgctccgcgaatatctcctggtcagttcctaggttgttattcgcttatctcccttcatcaggtaactaggcttatcaggcccaaatacctaatctgttcatgggctccagagctgcgcaggtcctctacttggtgggcttagtgggctggcatggtatttttgcaggtggattcctggagagaaatccagctctaacatttgccatccagcccattgagtaagtaggcgaactcaatgagcggacacctaagccaagtaagattgcgaaaatattgtagataaggtagtagatacgataagatcaatcggttctgaggataaactcaatgaaaacggtataatcttagattcttaaaccgaaagatatcgagtagatacgcgaggtaaatcgcgggtgacgtggacggtcgagatgacgcgtctcttcagcgcaccgcatctaacggctcagatcaggcgcggggaagagatctctacaatctcaaaaatcgtggtgatgatggcttctttaaataacttcccacatctccactcgatttcacgtcaactcacacgactcccaaggtaacttctctccttctcaactatttactgcctttaacttttgtttttagagatagaaactctaacttttcttccgctatctccttcgtactttctctgctttctctcttctttccttcatatcgatcgtctctcttcttcaaaatcaagagatgagtgacttagacgattcccagaacaagagcaatcacagctatggcgacgacgatagttcgtcaaagatgaggtcggcggcgtcctcgcggcaggaacccaggcgcgtcataacccttggcggaatgggtcctatccgaaggccatcgaccagagtcgacaagcctaagaagaagaaagctcccaagcaaaaggggagcttgccgatgacgaacaatgatttagtcgacctccagaggag

SEQ ID NO: 193967 - DNA, 1081 bp, Arabidopsis thaliana landsberg
atgattatactgcaactgattgtgaaaggaacacgggttaaagcacttgtgaaggacaaaagaaaggctttggaagcttttggatcttatgttgaggttggttcattgaatatatactcttggttctatccgttgcttctctttacgttggcaaacattgagtggaattataattgtgaagttgacgactggagatgcaagcgacgagcgtttcttaaagaaagcttttaagggtgttggtgcggtcatatccccgacagtatgtttaaccaaaccgttcaccattcgtatcaagttgtacattgatctaaaacatggagcatttcattctttccttggcaggaaggtttcttatcgattgtcaagagttttagaggtgtaaaacacgcagttctcttgtctcaggtaagaatacaatctccatgactttgcccttgtcatgctcagttccatattatgagaattagacagttaatggtgatgcattagcaacaatcttgcaaggcttggaagttggaattgttttgttttgttttgtgtctgtgaggtcatggtttaatgaagctgcagttgtctgtttatgaaagcagcggcggaattcaagctatgatgaatagcaaagccaaaaaactggccgagcaagatgaaaacgccgctatatcttcaaatgtcccttatacaatcataagaacaggcaagctggagaacagtcctggagggagtcaaggcttcaactttagcgcggtaaagtcatcttataatagataaggaaaaacatgtatcttggctttaaactttagacaatattgttatgaatggaaacagggtgctgcagccaaaggaagcataagcaaggaagatgctgctcgtatatgtgttgaagcactaagtgtgatcccaccaacagggttgatatttgaggtaggattctaacattttattgatgctgcttcctatacatataagcatttgttactgatgaggcttctgattcggtcaggttacgaatggagaagaggttgtatctgactgggaaggacaattgatgaaagtgatgcagagacagagtgacaagaagtaa

SEQ ID NO: 193968 - DNA, 204 bp, Arabidopsis thaliana landsberg
aaaatcgtcatcattcccaataccgataagttcaccacgccctcaagcatgctcacttctgggcacttttcgaataaccaagcgggccaattaaaggtgcttgtcgtcctgatatcgatagacgtgggtgataagcaggagccaatcataccgctaaggccagatgaatatttaacaccggccaaggacggcaagaaacagaag

SEQ ID NO: 193969 - DNA, 1130 bp, Arabidopsis thaliana landsberg
cctacatctgatcattggcaagcagcaaaacgagttctacgctaccttgcgggaaccaccacacatggtatcttcctcaattcatcgtctccaatacatcttcatgctttctccgatgcagattgggccggtgactctgatgactatgtctcggccaatgcgtatgtcatctatttagggagaaaccccatctcctggtcctctaagaagcagcgtggtgtctcgcgttcatctacggagtcggagtatcgagcggtggccaacgctgcctctgaaatccgatggctttgctctctcctcacagaattacacattcgattaccacacggtccaaccattttttgtgacaacattggagccacctacttatgtgccaatccagtctttcactcatgcatgaaacacatagctctggattatcactttgttcgcggcatgattcaatcacgagctctccgagtctcacacgtttccacaaatgatcaactcgttgatgcactcaccaagtctctctcttgtgcacatttcctttcagcccgttccaagattggagttcgtcaactccctccatcttgagggagcgtatagagtatattacacatgaagtcttaaaggacataattgtaattagttaatccctaatcatagggctgtgccttagtatatatatgtacattcctactctaataatattcaatacattaagcatttacaattctctctttccttgttttcagttacttggaagcctaaagaagatgattctgcgtaattccaaatatttgaaagaaattccagatctttctttagccacaaacctcgagagactagatctttgtaaatgcgaagtgctagaaagttttccaactcctctcaactcggaatctcttgagtaccttaatctcctacgatgccccaagttgagaaatttccctgagattattatgcacagtttcagaggagaaattgacatcgaggtagcagattgtttatggaacaagaatctccctggactcggttatcttgattgccttagaagatgtaatccaagtaaatttcgcccagaacatctcaaagacctcacagtgagatgtaacaacaagcttgagaagctatgggaaggcgtccag

SEQ ID NO: 193970 - DNA, 149 bp, Arabidopsis thaliana landsberg
tgccgaacagttcgcgtagagtcagagctacgccagaaggcgcaccggacagtgaacagtgactgcctgtgcaacaccagactgtccgatggcccaagatgtcagagctccaacaatcgaaaccgtcagaaccctaacagttgggtgac

SEQ ID NO: 193971 - DNA, 520 bp, Arabidopsis thaliana landsberg
atggcctccagcaaagattccgatcgtaacctagggtacatgacccgcaaggatgcagaattgaagcttccacggatgacccaggtcaaaaacaagactccggcgccaatccaaatcaccgccgagcagatacttagagaagcgcgagagaggcaagaggctgagttccgtccgtctaatcagacaatcactgactcagctgagctttccgactacagactccgacgtcggaaggagttcgaagaccagattcgccgtgcgagattgaacacccaagtttgggtcagatatgcgcagtgggaagagtcgcagatggatttggagcgtgctcgaagcgtgtgggaacgagccttagaaggagaaaattaccggaaccacacgctctgggtcaagtacgccgattttgagatgaagaacaagtctgtcaacgaagcgaggaacgtttgggatcgtgctgtttcgctcctccctcgagtggaccagctttggtacaagtttattcacatggaagagaaacttg

SEQ ID NO: 193972 - DNA, 276 bp, Arabidopsis thaliana landsberg
  unsure (1)..(276): unsure at all n locations
anaatatagaatccctgtatttagatggagctgcaattaaggatctcccgacagacttggtgaagcttcagagacttatcttattgaatctgaaagagtgcagaaggctggagattattccagagtgtattggaaaacttaaagctcttcaagaactgattctctctggctgtttaaatctcaagagttttccaaatcttgaagacaccatggaaaatttccgtgttttactacttgatggaacttcaatagatgagatgccaaagataatgagtg

SEQ ID NO: 193973 - DNA, 391 bp, Arabidopsis thaliana landsberg
attgatcaaccaacaacgcaaaaaattttgcgctggagtgacaaagaattggaccgatgtttgcactcgagcattctcagatttatgcgagacagctcataggatcaacagggagaaacaattggctttagagagagagaaattcatagaggatatgaagaaactcaggttgagtctccaacaagaaaaccctaataggttaagtgtacaacaagtaaaaattgcttctcctcctcctcctcgtcctcgtcctccagttgaagacgaaacaaaaaaggcccttagagagaaagagacaatggaggtaaaagagaaggaaggtgtgctggcggcagatgatcggacggttttcctgacgttttcaaaagggtatccgatttcggaagcggaa

SEQ ID NO: 193974 - DNA, 134 bp, Arabidopsis thaliana landsberg
caaaccttgaaatgaaggatggttcaaatacgaaatcggaaccacgaatctcttcttgctctccatctcttctccgacataaaccgcaacatgtcctttcgggactcgagattgctgtttttgggactgtttag

SEQ ID NO: 193975 - DNA, 765 bp, Arabidopsis thaliana landsberg
atggatttactggtaagttggtcgatcacatataagttaataggttctatttggtagtcatatcaatgtatgaagttagttcttataaagatcacactttctgtaacttccaggttaaaatagtttgtcatctgcaccatgaccagctgaaggctgttttccatgtttctcaaagaataagaatggccgtatgttcttctttcccctgtttaagtttgcatccataaaagctcaattttttgcagttttacttgatgtgtattaatctgttttgacttttctttgaaacagaccatacttgcaagacaatatcatttcaattatacaacaccaggccgctcaagacaggaaatgttgagggtcatgaccccagttccaataaatcgttggccatttcgtaggtacatgttttacttcaacttttacccttttgaaaagagcatcaaacaactcgtttggctcataacaaaaccttctttgatctaaattagcagaggagatggaaacccaacaatggtgtcaagcccacatacccccaaagcaccaaaacatgctcctagaccaccctctcgaaccaaactcgcggagatgaagcaaatcactgctgttcttttccaagaccagacaccatttccttcaagatgcatcgttccttctgttctccagaggccgactttgttcaaaccaatggctccaaagcaccctcgagtgctcttctatgaggatgaactatgtcaagctgttgctcaaaacaacctcacctga

SEQ ID NO: 193976 - DNA, 390 bp, Arabidopsis thaliana landsberg
gctattgagagaaggagagctcgtatgggagaaggtgttggccgagatattgagaccccaactccacaacaacttggggttcttgattctctagtaccgttgtcaggtgctcatctcgagcacgactattctatggttactcccggtccatctattggattcaagcgtccttggccaccctcaactgctaaagtccatcagattttgctcgacatcacaagagaaaacacaggggaaaaagatgccctcactccacagaagaagctcctcaactctattgataaagtggagaaggttgtgatggaagagattcagaaaatgaagagcactcctagtgctaaaagagcagaaagggagaaaagagttaggacgctaatgtcgatgcgatga

SEQ ID NO: 193977 - DNA, 158 bp, Arabidopsis thaliana landsberg
gtttgatcttaccttttaaaccttttttccggattacttctccatcttcaacgttacggattgatctttcatcggcgcaagtcaacaaaaaacccgaaatggcttcgactcatccgtatctatctaccagagaaaagaattcaagtcggctttcttaa

SEQ ID NO: 193978 - DNA, 452 bp, Arabidopsis thaliana landsberg
atggtaacgtggcaactggtaagacaaatcatatcaatatcaaatattcacactttgatcgaggcagagactcgacaatgtcgagatgcaaaaaaaagtaaacaagaatagcgattctgctgaactaaacaatacgatatatcccgagttgattagcgcactggttagctttggtcctgatctctattagaatcaatctagagttcgaataaaaaaaactatacatgtatactaaaagaaaatcgataaaacaagttaacaaaaataggatgaagtaaatgtaattccatgttcataattttgcaaaagaatattatttttttgttcgaagttagtacttcgctagttgcactacatacatgcatacagtatttaaaagcaacaacgaacacaacaacatgaaagatgaagagaacacgtcatttagaaggtcacgtgacagtgaaaattga

SEQ ID NO: 193979 - DNA, 95 bp, Arabidopsis thaliana landsberg
tccggtttaacgatcggtttggcgtttgtctagtgtccatgagtataccggacacgtcggctgtaagagacaaagagtatcagattctaacttga

SEQ ID NO: 193980 - DNA, 409 bp, Arabidopsis thaliana landsberg
atgaccaccaaacgaggaggaagctctagcatgtaagaaaacatgaaacgcaaaatgagttgagtttgaggggtaaccagttgaaaagagggaaaagatagaattgagaaatggatttccggcgacgcatgaggaagagagtttacccatgggaaagcaaggagacgtaagaaccaactccggagagcctacatcgccagatctgagcaagctttgtatcaactccggttgtttgaatttgaaatcaaacttagaacacgtagactgaagagtcagagtaagaacaagaggagaatgtctgacattggcgatccataggaccacttgcgtcggcaaacggtgcaagcaaaaacacctcgggaatggtgcatgtgaggatgtgatcggcgaactagaacacttgacttga

SEQ ID NO: 193981 - DNA, 143 bp, Arabidopsis thaliana landsberg
gtttggtcaagaaaataataatcgatttggattgtttttggattgaacgtaacatccctcaaagagtccgaccagtcaccaaaccgggttcaacttgtgaagagatcgcaagtcggtatgaagatacgatcgtgcaatcctaa

SEQ ID NO: 193982 - DNA, 176 bp, Arabidopsis thaliana landsberg
gatatgcgcagaagacggctcgtgatgttgggaccagggtaagttgtatcgactcaaaaacattctcgattctaattcttttggtcttcactaaataaaactcactccttcgtgtttcttttttttgtcgatatttcaagagacaaggccatacaacttttgattcaagaaccgag

SEQ ID NO: 193983 - DNA, 278 bp, Arabidopsis thaliana landsberg
atgacagcagaaacgtttttcaaggatattactgaagaagtaaactttgattcttcatcagattggtcagaggtgttaattatgcttgaaagttcaattgctaacttatctggaaagcttaaatcagaagcctttctagaggcacatgtgtcactgctggacaatcggaagttcacagcttgccaaaatttgctaaatctgttaggtgagatgcccaaggagtattcgaatgagaggtggaacaaactttatgcagattgtgttcttgaccttgagag

SEQ ID NO: 193984 - DNA, 862 bp, Arabidopsis thaliana landsberg
atggtgcagaagggatctcttctctacgctctcttctctcagtcatcagcaggtagcagcatctcctccttcttgttttactgttcctttcctgtaaaagattcgtttgtttgtaggcattacttgtgaagtcaagtttcacatgatatctttaatggatcatatcatgcttcggtgattgctcgacaaaattttgtagacttttttttgtcggttggactggggcttggaggaacaaacacccctcaggttaggtctcgtaaaagtattagcagtgagaggacatttgctgcgacaggagatgaaagattgctatattcgaagttgggtgagtagtttgcgcattcgtgtttttttctctcataagacgtacataactcaataatcaaaggcaaacaaaaggatctttagaatttaacacagtaaaggattgtttaatgagactacttgaaatcatagtttgttcctgggatactgagtaatcttacatcaacctgtttgccttttcgacttaacgaatctatatttgacataaaagttttgctttgacataattcacttgaattgttatctctgctgttctgggcagctgaacttgcagaaatgctatctcatgacatgaaaaaggagggcctaacagcaagaacgttgacacttaaactgaaaactgcctcctttgaggtgatcatctaaatttcattttatttctccctgtttggaaatccatctatgtgctgaaactgtgacaatctgctatgctcagatcaggagcagagctgttagcctgcagaggtacacgtgttcaagcgatgatatactaaagcatgctacaaagctgttgaaggcagaacttcctgtttcc

SEQ ID NO: 193985 - DNA, 105 bp, Arabidopsis thaliana landsberg
gtgtgcgcattaaatgcgagtgtcccctgctggcctttgggtataccttgtcttctttgcctaagaccggctcgggcgagacggatagggcttttgtagaacgag

SEQ ID NO: 193986 - DNA, 438 bp, Arabidopsis thaliana landsberg
atgaagtcattatcgatcatgtaagttgatataaacaaacataatggccggccacttatatttcactaggtatacttgttgtcactttacattgacattgtaattttgtgtttaccttgacagaaatttaaattggaatgaccttacgggtcctcttcctaaattgcttcttgatagagaaaagaatgggcttaagctaacgtaagattttcacccttcttttttttttatcaactttcctcaacctatagtcttattcaacaacacttattttcttaaggatccaaggaaacccaaagttgtgtaatgatgcgtcatgcaaaaataataacaatcaaacgtacattgtaccagttgttgcgtcagtagcttctgtgctcatcattatagccgtactgattctcattcttgttttcaaaaagagaaggccaacgcaag

SEQ ID NO: 193987 - DNA, 278 bp, Arabidopsis thaliana landsberg
ggaagagctgcaatgccatcttgatcagagaaggagatgatatgtgggaggaattggacactgaagacgagtcagagctcgcagttgcaaagatcgtgtcgaccgacaccctcctgtgtcgatcgacaccatatgggacgctctttttagagacgacccaatacgacgctgtcgatcgatacccctctagtgtcgatcgacactggattcggacatcaccctgcgaggtgcaaatacctatgcagcccgagtttgtctaccctcttcttgtcccttaa

SEQ ID NO: 193988 - DNA, 1751 bp, Arabidopsis thaliana landsberg
atggcgaatttgcaacgtttttggctgatgagaaaggtcttcaccaccggttgtggtttgacttcaccagcaggtgctggagttatgtctcataggattcttcgtacatccttaaacaaccattattctcacaatgtctttactaatttcacaagaggctttgcaactaaacctaaagagaaagacaataaaaaacacaaaaaagttaagaagacaagacaagtagaggagaagaagaaaaacgtggcagcgataatgaaaggtgcagcagtattggatccatagattcctgaacgacttccatgttataaaacaggtcattcttccacttggacgtcctgtgaatgtaatggctatcagggtttctcatagttttcattgttttcagaattgcaccctcagatttgtttcatacctttaggctaatattttctatttccgttttgctggcagggttgtttatggcacaacgagtccattgtctacgatgtgggacagattagaatgcattatctcatccatgtcaaaatacaaccttgaaattaaagtctcctctcctcctgttacttgatatatgcatattaagaaagtattatttattgaatcatccatgattctgatttataattaaagtacatgtacactgtacagtaatacagtatgatgatttttttggtcaaaacctgttttttttttttgtttttttttttcaacagctaatgatatgatttttctttacttcaacattttctactaaaatgctattatttctaaataagatattttatactagaagtctagaagtaagaaactaaaagtccataaacaagatttcgcgtcgctaagcaaatacgcataatcagttctaacatacatttatagaatttactttaaattttgttttcaggaaaagaaacaaaaaacgaaaagtcaacggctgacatcaaaacaaaccaaagtcaacagtcaaaccttaataaggttaggccatgtgcactcgtttcttctcgagatatttggaaatcggatatcgacattcgccgatcatgtccaaaagtatactatttagaccacttgattttggtttttgattttttctttccttttgtatttatgtataactatatattcttttaaacatgttgataataaatgtgtcgttttggctgaaaatttcttaaataaaattagagcagtttacggcatctaaaaactactagctagtgcggaatcagtagggtttagaagatccaaatctttttttctttcgaacaaaataatccacaaatttttaaaaattgattaatctatcgatttaaatcattttctcaaaaaatgtagagataccaacttctttagaaaatagattcttcgcatgatttaacagttcgtaacaaaataaaaattacttttttaccaaaaaattaaattaaattaattacttatacattagtatatgttgaaaaagatttcactatagaattaacaagaagataacatatgtagttaaacatatcgtaataaataaaaaattaatcgatttttaaagttcgtatatttgaatttttgatattctcatgactttttttttcttcaacaatattctcatgacaataatacgtttaatggtgaattttgagaatcttttactgtagttaattttcaataataaacaaccaattgtggaagcctctttgatcggtactcaagttttagaggtttttacattagagagtggttacaaatgctag

SEQ ID NO: 193989 - DNA, 348 bp, Arabidopsis thaliana landsberg
gaacacttcctcatgggaagggaaagtatgcatggcctgatggtatcatttatgagggtgattgggaagaagggaagatatccgggagaggaaagcttatgtggtcatctggagctaaatacgagggggatttctccgggggataccttcatggctttggcacattgacttcccctgatggatctgtctacgctggagcatggaggatgaatgttaggcacggtctaggaaggaaagagtattgtaactcagatgtatatgatggctcatggagagaaggattacaagatggtagtggtagttattcttggtacaatggaaataggttcattgggaactggaaaaaag

SEQ ID NO: 193990 - DNA, 703 bp, Arabidopsis thaliana landsberg
ccaatcactctctcaccatcactatcgccgcctcaaaaccccaaaaccctaactccagatcaaaaatcctcctttgaatctaccctccacgattccttaaatgcccataacaccgatgaagcatggaaggcttttcggtctctcaccgccgcttcttctctaccggagaagcgtctcatcaattcccttattacccatttgtccggtgtcgaaggaagcggtgagagtatatctcatagacttaaacgagcttttgcttctgctgcttatgtaattgagaaagatccgattttgcttgagtttgagactgttcgtacgcttttggagtcgatgaaacttgcgaaagctgcagggcctgctttggctttagtgaagtgtatgtttaaaaacaggtactttgttccttttgatctctgggggcatttggttattgatatctgtagagaaaatagaagcttggctccgtttcttaaggtgtttaaggaaagttgtagaatttctgtagatgagaagcttgagtttatgaaacccgatttggtagctagtaatgcagctcttgaagcgtgttgtcgacagatggaatctttggctgatgctgaaaatgtgattgaatctatggctgttttaggtgtgaagcctgatggattgagctttgggtttcttgcttatttgtatgcgaggaaggggcttcgagagaagatta

SEQ ID NO: 193991 - DNA, 520 bp, Arabidopsis thaliana landsberg
atggcctctataatcatctcagaccacttttacaatgttctccatatagatcaaacatctaacactcttagacttgctagagcagagctggaaggttctttttgcaacgctacttacacagccacaaccttgccttccaaaatctttgagatttcatcaacctacaagagcctcactgttttctacctctgcgaccctaaggtttcttaccgttcgagttatacatgtcctggtagaggccttgtctcagtgtctcaaaattctgattaccataactcctgccaagacagtttcacgattaacgttccaaagagctttgttccagaagagaaagagttggatgtgaccaatttggaaagtgctttaagagaaggatttgaggtgaaggtaaaggttgatgagaaaacttgtcaaaaatgtacatcctctggtggaacctgcggcttccaaaattcaacacagatttgctgcaaggaagcctcatcattaggatgcaataaagtccatccactacctgatg

SEQ ID NO: 193992 - DNA, 102 bp, Arabidopsis thaliana landsberg
cacatcattcacatgggaatggcttcctctgatcttgttgcagcggtgcagccgccgctgtcacaaccactgatggttatgaagaaacgtcgacggagatga

SEQ ID NO: 193993 - DNA, 103 bp, Arabidopsis thaliana landsberg
atggtggccgagggtagtggccggaatttgtggtggccggaggtggttatggctggaagtggtggtagccgaaggttgtggtggtcggaaatagtggccggag

SEQ ID NO: 193994 - DNA, 1513 bp, Arabidopsis thaliana landsberg
ctctgattatctctggtgtgagctctcgtgtcctgatcagtcatgtccctctgaataactcgatcttgctatctgatgggatccatgacgccttgaatcacgagtttctcaccctcgatcctccaaagaccttgtcaaggaccgcgtgtgttcatgtctacgggtttcttccatgtgcagacaatgttgaaggttatatcttccaagttttctcctttgggagtctcttgatcatcggtgactatttcttatctgaaggaagatcaaaactctttgtaatattcgaggtcgggttctatggtggtatcatcttccctcttcttacaatgttcccaagaattgctcttatgctctgtaaggatcctctctttctctttggtttcctctacgaaaatatctgaaaacgtatatattctttgatctcagcgactggactatcattgagcagagatgttgctagctcctttatagatgaaaacgttggacttactgtgggtcacactgtgttttctctcacaattcaatggggagcttgtgttgtgtttagcatcactggtccacgttctgaccaagcagtaagaagaacaacctctgtaggatttccttaatctattagtaaattaaggattggttgctgaatgttcatcgaaaaatcatacaggatggattgatcgaaagactaaagatattgaaaggctttgttggtaagtttaggtccccttttaattctctttgagcatttttctgtatgaagattttgtggtttatgtttatatatgcagaagcaagagtagaagcggatcctaagaataagaaagctgcagggattatgctgttgagtctatctccctttctcatggtgacattttcggctatatttgattcacattcttggagtcacatcattgtgttgatcacactcataatttcttcttcttcaaccgttgtctactttgtttactcggtataatccctctagaaaacacaagtaaacccttttggtttcgctttgttatctaaatgacaatttgtggaactctgcagtatcttgatacggctaaccaagagaagagcttagatcacgcgaggtttgagctcatgtcagaagttcataagcacttaaagaggttttcaccgaaacaccttataaaagatggagaactaagcaaagagagcttgaaaaggttttattctctctatatttttgaagcaataatagtttcatttcagccttcttacgtcgtaaatcattgcttaaatcgatagtttgttcaagaaaactgataagaacaaagatgggaagatacaaatatctgaactaaaagacttaaccatagagctttccaactttgggagaatgagatatgacatcaatgagcttgctaaagcttttcttgaggattttgatggagacaacgacggcgaattagaagagaatgaattcgaggaagggattgcgagacttctcaaacaatacaaattcaacgttgaggaccaaagagagaatcagact

SEQ ID NO: 193995 - DNA, 368 bp, Arabidopsis thaliana landsberg
atggttcaaacaatcatcgaccccatcattcctccagtcaacggcgacggtacggagtcaagcctcctcaatggaggagatccaccttctaccgtggaagtagctgccaaagcaatcacggatcaaccagctcacggggcaacttctgttgatccgccttccttctccttagaagacctcaaagtcatcctcacgaccgtgacaaaagacgtgtctaaatccgtcatggagactaaccgccgactcgatgagctggccaaagggatctcccaacgcccgaactccgaagtgactccgccaagaataatccaaccgcgcggtcttagctttgaccacacggatgcacaatccaacaagatgaatcccag

SEQ ID NO: 193996 - DNA, 254 bp, Arabidopsis thaliana landsberg
ctgctcggatgatccggaacctcggattcgacccggttcatgcggaggagataaccggaaagaagcagtaggagaaacgaatcgatcggaaggaaaaggagaaatgaagcgattagaagaagaaggaacgtaacagtaagaatggcctaaagtctcatccaacggctcacggaaagagtcaatcagatcggaatgagagggattcgccgccgaggagtgacgacggcggttacggtgaccttgattgaagcaag

SEQ ID NO: 193997 - DNA, 1597 bp, Arabidopsis thaliana landsberg
tcctacattttgtctctgcggaccgagaagaaaggaggctccgcgggaagaggattgtaccatagaagcacggaggtaaacctctttccaatatataaattctggcaatgtagttgggctttcatgttgatccgaatgaatcatctttttcgcggagtgaaatctttgcctgctaggcaagatgataggatagcaagttacaaattctgtttcggtaggacatgtatttctattactatgaaattcataaataaaatagttaatcgtggggttaccattctctctttttttttttcgttatctcgcatgtggtcctaagaaaagggaatttgtcgatttttcggggtcttaaaggggcgtggaaacacataagaactcttgaatggaaatggaaaagagatgtaactccagttcctttggaaataggaagatctttggcgcaagaataaaggattaatccgtatcatcttgacttggttcttatttctctatttttttaagtttaagaaaagaataccgtttctcctacccgtatcgaatagaacatgccgagtcaaatcttcttcatgtaaaaccggcttgatttagatcgggagaatcgtacggttttatgaaaccatgtgctatggctcgaatccgtagtcaatcctatttccgataggagtagttgacaattgaatccaactttttccattattttcatttcatacccgtataaagtgcgaaaggaaagcccggctccaatccaagttgttcaagaatagtggccttgagtttctcgaccctttgacttaggattagtcagttctatttcttgatgggggaagggatataactcagcggtagagtgtgctcgcaacttgggactatcgggcaaaatcccagatgttcttgagaagctttcatctctaatgatactgaacctggggaataatcgttttcacagtcttccgtgcagtctaaaggggttgtcaaatctcatagaactttcattgcatgactgccaggagctcacatgtcttccccctcttccatgtcaactaaagcagctaaacctggcaaactgcttttcgctggagagtatatccgacctttcagagctgaccatcttgcacgacctcaatctcacgatctgcgtgaaattgaatgatgttccaggtctagacaagttgacggctctgaaacgattatacatgagcgcctgtaactccacctgctaccctgaagtaaagaaaaaactgtccaaggtgattctccaaactccacataatctcagttagttgaatttcaggatgtgataacaacttacttgcaatgtttgtgaacttctcatcacaggtttctttgaaattgttgcggaatctgagcttgcctggcaacagaatcccaggctggttctcacaaggccctgtcacgttctcagttcaactgaacagagagatcaggggcgtaatctttgctgttgttgtggctgttaaccatgaaattaaagataactaccagatgcctgatgtggtggagattcaagttcaaattctggaacttgacctggcgatatacacaaccacattgcacctctctggagtgcctgggacaa

SEQ ID NO: 193998 - DNA, 336 bp, Arabidopsis thaliana landsberg
atgccgactgaagtatataccggtgttcttgaagaaggttcgacttcggttacttgtgctatatgtattgatgattatcgcgttggtgaaatactcaggatcctaccttgcaaacacagtaagtcccattttgttctattcaacttggagttggttaattatctttcataagcttctttaaactagttttgttaactttttttttactcggggcagaatatcatgcggtgtgtatcgattcttggctcggacgttgtagatccttttgtccggtttgtaaacaaaatccaagaacaggaaatgatgtaccaccagcatcagaaacaacacctttga

SEQ ID NO: 193999 - DNA, 210 bp, Arabidopsis thaliana landsberg
atggacttcatcgatgaacgtagagatcatgcaatgatccgagttcaaaactatcaacaagctgctgcccgctactataactccaatatcaaaattcggagattcgaagtgggagagctcgttctacgaaaagtgttcagcaacacgaaagagctaaacgccagaaaactgggaactaactgggaaggtccctatcgaatcaccgaggtg

SEQ ID NO: 194000 - DNA, 216 bp, Arabidopsis thaliana landsberg
ttgtgtctttcatcgccgcattaggcttcttgctgtatggaggaaggtctgtgtttttgttattttcatatgtctcatcatcaaaatgtctgcaagttcttcattggctttactgggccgtcttttcttatgtgtttttttttatgctatagattgcttttcatgctaagaaggttccctatcgagtcaaaaggaagaaggaagaaactccacgag

SEQ ID NO: 194001 - DNA, 805 bp, Arabidopsis thaliana landsberg
atggtatcccttgctggatctgaaattgaggttccttatgtttctcatgtccggagaagccgtccaagagagaacattatggctcttttggtatgtctcttggttactcatgctcctcaatatagtaaattaatctcatacctttcctttgaactgaaaaaagcttccaatcatctggctcgtgttacatctgtgccttgtgtcacatgccaaattctatctcaagaagcacagatgtaaaaataataaaataagtgatcatcttctatgccattattttgctttgctgttatgtcggaatgtaattaaggattttacaacattgtgtagggatgtcattccagttacttggaagataaagctagtgcagcagagagtaacctcaatctgagtccatcccagttaagcagtgaggttgtgaaccgagattcggtggaaaagtctgcttctcgaccggtccaaaacgaagtaagagatatctgttgtttaagttaccttactctcgtaattctcatttcgtactttgctgatagtagagatggtatagggttagatctcatttaccatctacctgatataagatgaatttggtgttccaggtatgacacagtttctcattgctttattggtttgcgaatgcagtttgctacaagtgacgagaacaatgtggagccagagcacatagactcatctggaaatagctcggatgagaataacattggtgtgccaatcatgcaaggtggtgcgcttagaaggaagcatcatcgagcttggactctgtctgagatagcaaaactagttgagg

SEQ ID NO: 194002 - DNA, 52 bp, Arabidopsis thaliana landsberg
atgttcatccgttttcgtcgagacatgaaatttgtgggatcaaagcaatcct

SEQ ID NO: 194003 - DNA, 236 bp, Arabidopsis thaliana landsberg
atgctggtggcccgaagtgaaaaagaattgccagcgctgctgacgaagaggtcgccaaggtagccaaaaagaaaagggaagattctgaaaaacttagccctgaagagttgaaccctgagccgaaggtggccactgcaagaaagaggaaaactgcaactccagaaccagaaacgttggttcaagaagaaagtactcctgcaacgccttctgctgttgaagtagaagagattatgaag

SEQ ID NO: 194004 - DNA, 1190 bp, Arabidopsis thaliana landsberg
gacctgcaagcggttgctgtctcctttgatgtctaaattttggtttctaatttcagaggaagtaaaggctaagcatcccagagtctcttacgcagacctttatcaggtaaatcaacattggtatacagcatctcgaagccattaaactcataaatactctcttcacccttgatggttagcgtgacagattctttcatttcatttcagctcgctggagttgttgcagtggaggttactggcggccctgcaatcccatttacaccaggccgtaaggtagttacacttatcgctaaagcgtatgcgttaaatcatcgttgctaagtgagtttactaatgttgagaaatatgataccaggatgctgattccgcggacgatggagaacttccaaatccaaatgaaggttactcctgcagcttgtagctcctgcaacggaattctatttcacaaactgactaagccctccttttggattattgcagctgccccacatttaagaactctcttctctcgtatgggtctattggatagagacattgtagctctctctggaggtcacactttggtacttattactaactatccttcaaaatatccgccagtcactaaacatgctccaatgaaccaacttggttgctactttgtatatagggacgtgcacataaggagagatcagattttgaaggtccttggacacaggaccctctcaagtttgataactcgtatttcgtgtaagccaacgataaagtcacacaagagttaaagcgagagagagtgagagttctgaaacttacattttctgctgattggtttttcagagagcttctaaaaggggagactccgggattgctacaacttaaaaccgacaaggctctacttgatgatcccaagttccacccttttgttaagctgtatgcaaaggtagattagatttcactacgattataagaaacttttactttggatgattctctggtttcatcaacaacaaaaatgattttgatgtgtatgtcaggacgaggatatgttcttcaaagcctatgcaatttcacacaagaaactctcagaactaggatttaatccgccaagaagaattccttcagcagtgacgcagcagacgcttggaatcgctgttgctgcagctgtggtgatctttacaatatgctatgaagcaagcagaagaggcaagtga

SEQ ID NO: 194005 - DNA, 174 bp, Arabidopsis thaliana landsberg
aagaacgaaaagtctcctcctttactaatgggtgcttcagcagtaaacaccggaaaactcaaaacgacggcggcgaaagaacaattccgatcaatccactccaaacccatatcgttgatcaagtcccaactccatcgacacccatctcagttcgatatccagagacaattttag

SEQ ID NO: 194006 - DNA, 134 bp, Arabidopsis thaliana landsberg
tagtaagtgcatcctacaactctttcccgtctgtgtgctgaatattcgcatcaaccagacggtcaacaagggcgctaagaacgactcccgtaaagatactattggcatggtcgtactctttctcctgttcagga

SEQ ID NO: 194007 - DNA, 163 bp, Arabidopsis thaliana landsberg
atgagctcagggatcaagtgtgaatgtcttgagatcatgtgtgatgttgttcaaaaatatgaagttttaatgacggatgatcacgagaagctattgaatacattgttattgcaattgggctgtaaccaagccacagtcaggaagaagactgttacatgcattg

SEQ ID NO: 194008 - DNA, 647 bp, Arabidopsis thaliana landsberg
atgttgttactctcgaaatatcgggtgagggttgtgccggttattaaaacaggagaaccggatatcaagaactacgttactcaatctgcagttgttcatggtcttgaaggttgcaaaggtagagattggtttgatcacatttccgctctcccgatttctgatctcggcctcccgtttatgtcacccaatgaggtaataaaataaactttaagaagtcatgacattaggctcgtaaaccgctgaaattgaacatgttggtttcaggttattagcattgagagtgaggaacttatccttgaagcatttaaaaggatgagagacaacaacattggtggtctccctgtagttgaagggttgaataagaagattgttggtaacattagcatgagagacattagatatttgcttttacaacctgaagtcttttccaatttcaggtttatttttactcacttgtttctcattacaacttctctggtaacaatgatgactgaatgatctctttgttgatgataaagacaactcacggtgaagagtttcgcgacaaagattgctacagcgggagaggaatacggtttagcgattcctgcaataacttgtaggcctgattcgactttagggagtgttataaacagtttggcttcgag

SEQ ID NO: 194009 - DNA, 718 bp, Arabidopsis thaliana landsberg
gaggaaagtacggtgccaaaacacatttatcggcgcaccgccgccgcaaaatcttgcaagccgcacaagggcttagtacaaccggtggttgtggcggctgttgcggcgaaggaggcggcggaggtgaagaagtgggagaaggagagttaacgggagtggtggtttctgtcaccttggcgacggcggaagcagtaggtgtagcgaccccaccgttaatctccatctttagcatgattctcaaaatattttgggggcttatttgattttcttttgagtcagttagttgagtgtcttttgaagcaattgatgaaccaaagtgtgttttgtagagtgaagtgatttatggtaaggaccattgccagtgtatatatagagagagacatactaaagagaatgattacgtgacgatataaatattgagttatgatgtcattgtttttattcggaataattttatatctttacggtgactactactaaattcctcttgagcttttttgtttcaacggttgattgactttggcggctcaattaattatttccacattcgcacttaagctaaactttttttatatttaatttccaatttatccttaaagtagtcttaaaaaggagtaatccgttccccgttctcacacatctcccttatatgcaaatattaattttatagaaaatatgtgtgaagaagtacaaacgcgttactatctttgatatttaa

SEQ ID NO: 194010 - DNA, 144 bp, Arabidopsis thaliana landsberg
gttgattataatttgtatggaatgggtcatgtgcatatatcaaagatgaagttccgtagcccagtgcctcaccatttccggccaaggagatttgatttggatgattgtccgggacaaaggattgacgaagtggctattacaaag

SEQ ID NO: 194011 - DNA, 576 bp, Arabidopsis thaliana landsberg
atgttgcctgcaatcaccttcgctttggcccttattttcaggtaacgatggaaccatctaacctctttatcatcaattgataatatatattaatctagatttttaaaaagcactactgaaagtattgacaacataatatagaacattatattttcttattaattgtaatgcaatctgattggttttcttttccatcaaattaccttaagtatacgtaactgcatccactgagccctctttctaaagcttttcctgaaaaaatgtcttttcttagctatacgtcgcatttttataaactttgatggaatgatgcggaaaattattaaaaagcgactctattttgtaacgccaggaaagaaaaaaaacaaatactttctactatgattcatattctcaataacttgtttcaaaataatcattaaaattttactttttttaggactgaaaatgtgaagattctaaagaccaaagcaggaatgttgaaggtgattggaactttgatctgtataagtggagctttgttcttaacattttacaaaggcccacaaatatcaaactctcactctcactctcacg

SEQ ID NO: 194012 - DNA, 99 bp, Arabidopsis thaliana landsberg
tggcgtaaattgaaacccctgagaatacgagatgatgtcgaccttgtccgcgatcgcatcatctattgccttcaagatattatcttctcgacaaactga

SEQ ID NO: 194013 - DNA, 305 bp, Arabidopsis thaliana landsberg
gatatcatttgagagtgccaaaagaatttttgatgacgaagccatgaagatttatccatggggtcggtcagcatttgaagcccttgttgattctataaaactgttgaggcctattagcaagtcgtacaccatcaatggtacgactttcgtgttacatgcttgggcgtatgattcaatcaacactattggagagcgatatgggaatgtggtcaaagaggatgagattccgttgcttagatggggtggcaaccgtacccgtgcaacaatagaatcgaccattgctgaagatatcacagtacatggtg

SEQ ID NO: 194014 - DNA, 553 bp, Arabidopsis thaliana landsberg
atgctgggaggcgaagctgtagaagcaggatcaacgatcaagggcctcgcaaaagagaatctcagcaagcccttattaggtgtatacaaaggtggcgtacaacatcccgccatgggcgatcagcttacaccaggtgccatgcctggtgaattcgaagcagacggccgcaggaagaactacggtgaggtaaccagcaaggagggagcacaatatggtatgatgggtttgggaggagcagcgactgtaggtgccagcattaccgatatggcttcgaaaggaaatgtgatcggtaaatccatagcggaaaatcattttacatcgccgattgcgggtggtgctgaagcatttggttcattgggtgcggcatccgggctgttaggcacaggtgctgcactcgtggatgcttctaacgcagccaaagaagctgccgacagcagcaacaatgcatctacacgggtaatggccggcgcgcaaaccgccagcagtgtggcagatgctaccaaatcctccgcttctgctgcatataatattgcggggctggtagatgcaaatg

SEQ ID NO: 194015 - DNA, 220 bp, Arabidopsis thaliana landsberg
aatctctgggtttgctctaattacaaccaattcaatggttttggaccaactcgacacatcgagtcaactcgctaccagcactgatcggtttcccaattccgtccaccgtaactgccgtatccagccgttaacggccggctccgaagaagaatcctccgatcataaacggcgcgtttctcgggatccgaaagcgtgcaatacgctgcgtggatcttcatga

SEQ ID NO: 194016 - DNA, 1228 bp, Arabidopsis thaliana landsberg
atgcgagaaatcagacgacgaccagaggaacgaaagaaagtggtgagttccatgaactgcaaagaataaaaaggactagaattataaatagttaaggaacaggtgtacaaaagcagaccagcgggtctgaaccgaagcttcgattttttgttggccaaactttgctctttcctttttagaatttttctttctttttaaaaacatttcttttatttcttcttactttaaaacgtgtgagagatcgatttgctacgaaatttcaacccctggttgctttgtttgatccctagattttcgccgtgttatagaagaatctcattttttgccgtctgaatcgaaatttcgtgtcgagaactcctccactcctccacttctcgttttctctttttaatttattttactctgtaagtaaatttcagtttctttgttgtctgtttctcttgatactccattgatacggtacatggtcgtttattattgaaattaaagtcaaacttttgattcattatgtcttgtaagaactcatgttctgttgatggtttcttgtttttgattttgatccttgctggtcattttcacagtagggatgtggattttaggattcgcctagatctcgcaattgggcttagttttgaatcagaaagttttaattttgacctttatttgactgctaagttctctatggttgtcactatgttcaaagttgctgtcgcatttatgtatctattcatgtgaatcatgtgattgcatcgacgttaggtgaaaatcatgatgtctaagttttggggtttaagttttcgagttaaagatgttcaaagtgacaatagtattactaaagttttgatctttttgctaattttagattgtgaccattttgagcgttattgagaactcaaagctcaagaatgcgtgcaccatctttgcttgcacaatgcttgccgggtttgctgcctcaagaccgaggcggtgtgtctgcattatcagagaaggatttgcagcttccaacaccagctgttgagatcataccttctaagtttttttctcattgtcgatttttatcatcatcatcattttaggaatgatagagtttctttcattttgagaatggagtagactctataataccctgctatgctaattctcttttcgtttctttctcctgtagacagtagctcatcgcaggtattcaggggagaatctagatgcgctcggtttacaagttttcaag

SEQ ID NO: 194017 - DNA, 625 bp, Arabidopsis thaliana landsberg
aaccaagctcaatgcagatggatctctggataaattaaaggccaggttagttgctaaaggatttgatcaagaagaaggaataaattaccttgaaacttacagccctgtagcaagaactgctactgtaaggactattcttcatgtggcaacaatcatgggttgggaaatcaagcaaatggatgtgaaaaacgccttcctccatggtgatctcacagaaaccgtctatatgacacaacctgctgggtttattgatcctgcaaaaagagatcatgtctgtcacttacacaaatcactctatggattaaaacagtcaccaagagcatggtttgacaagttcagcacttacttttggagtttggcttcatctgcagtatgtctgacccttctctcttcatctacataaaaggaaaagatataatcatgcttcttctttatgttgatgatatggcaatcacgggaaatagctcagataccttagctactctccttgtggaactcagtaaacgcttcagaatgaaagacatgggccagctacactattttcttggtatacaggcgcaattccattcagggggactgtttctctcgcaacagaagtacgcagaggacctccttgctgtagctg

SEQ ID NO: 194018 - DNA, 901 bp, Arabidopsis thaliana landsberg
atgcatctaaagagaaacgttttacctgtatttgatgtcaaaggtgggtctgtctctccctaacttgttctaatatttgtcgacttcatcgatctggttaaatcgaactttattacctgcgctgcctaggtcccttccctttctcctctcttggccatagagggtttctgtgtaagtcatgctcggaggtagaaacttctcatgccagccttgctgcgacttggacctcaactagtgctcctgcgtgcataacatctccggttaagagtagattgaagataacaagaaagttggtaacctttattctttgtactcgttgtcataaggtgtcttttctcctgtttaggtttacatcttatgtgcagcgaaaaatgattttctttgggcatcatgcatgagtataaatattcatttatgtgctgtcttgttttgccttttcaggccatcagaatccacgtcaatatcaccagtatttatgtcatcacttggaaatagcactcgaaagataacaagaaagttggtaccattttgttgctttttgttttgttatgtattttgcatcttcatcaatcattgcatgagaatctacattttcctaaatcataagatagtcttgatgttcaatttttgttgtcactttagcatgttatattaaatgcatgtccttgcttttcttgactttggttataaaatcttaaattatcaccatgcgtctcagggctttacgtcaagctttggttgggaaggcttatctcagtgcttctacaaatgtatcttcacaaaagaagtgccgatcaaaatttaagaagatgttggtatttttacttcataatgatgtattgatgttagcggaaccgacactgatgataaagagtctgattttgctgcatctggtttcctt

SEQ ID NO: 194019 - DNA, 26 bp, Arabidopsis thaliana landsberg
gtataagaatatctgagcatcattaa

SEQ ID NO: 194020 - DNA, 1399 bp, Arabidopsis thaliana landsberg
aaaatgtcttcatttgtcatccttacaagcccccacttccatttcctggtcgacataagaaagagttagaagataagtacagagctatgtttgccaagaacttcaaggaagtcgaattaaggatacctcttgctgatgctctaacgcgtatcccggattcccaaaagttcctcaaagacttgatcatggagagaattcaagaggttcaaaaaacaacagttctaagccatgagtgcagtgccatcatacaagagaacgatgtcccagaaaagctaggagaccctggttcattcactctaccatgctccctaggttcattgactttcaataaatgcctttgtgacctaggagcatcagtaaatctcatgccactctcagtagctaagaggttggtttcaacaagtataaaaactgcaatatctccttgatcttggctgataggtctgttagactacctcatgggttattagaagatttgcctatcaagattagaaatgtggaggtgcctacagactttgtagtgctaaacatggatgaagaaccaaaagatcccttgatattaggaaggccgtttttagctacagttggagtaatcatagatgttaagcaaggaaagattgatcttaatctggggaagaattttgaaatgaagtttgatatcaatgatgctatgaagaagccgacaatagaagaacagaccttcttagttaaggaagtggatcggctagctggtgaactgcaagaggaacttaaagaagcaaataattaaaaaactgttttgactaagagtggtaaacctgggtatctccctagtgaaactttgagttctgagaagtcattagaatcatacaaggcagcagttggctcacaggtttacaagggcttgatggagtttgacacgaagattataaaagctaatgaagtaagttcaacacatgctcaaccaaatgattccaccaacaactcgaagaagcctccaacttgtcctgaaagctcatgctcgaccgaacaactcatggcaagcactcacacgtcaaatgattggttagaactcaaggagagatctaaatggcaggacaaggccatacaacagctaacacatattgtgaaagagctgaaggatcaaatcaaggagctcaatggaaaagccaatcgagtaccactcaacatcaaggacgcccctgacgatggagccactattctagtcagcaaaaaaggatgtgaattcacattggaatggtctagaggagaagactatcttgataaaaaagaagcttactgtgaggacatggccactgagtacccaattgcagacctatcgaaaaatcctaatgagtatgatgatcacactactcaagaaggagaggatgcctcatttcctctttgccacccaccctaa

SEQ ID NO: 194021 - DNA, 168 bp, Arabidopsis thaliana landsberg
atgatcactaacacatctctccctcaaggagctacaaaccctagccatgctgcagagtccagagggtggaagaaggtcaagaatgcagtcaagagccagctcagggaggtcaagaaccgacatttggtcgatcaccggagaggctggatcgtgtttggtctgatgtag

SEQ ID NO: 194022 - DNA, 363 bp, Arabidopsis thaliana landsberg
  unsure (1)..(363): unsure at all n locations
atggctcgctttcgtgtattcaagcgcgatccgacggaacgcgagcagcgccagctcgggatcgtagaggttcacggccggggcatcgtccgagatccacggaagcatatgcatttttcccttccacacccagcggtgcggcaggaaatcgtcgganagcttgaagtacgtgtcttccgggagcttctgtttccagcccatcaggtattggctgccgagaagctcgcgccagaatttattcacgagatcgggaagaacgttcgccttcgtcagaagagccgaagcgtagctgccgcagccgccgccttcgaacttctccgggcgcccctgaattccgaaatgagtgtatggcttcgaaggatg

SEQ ID NO: 194023 - DNA, 277 bp, Arabidopsis thaliana landsberg
accctaatccgcatttgggacatctagctttagccaatacttttatcataactgctgactctataagtatgttgagcgaggcatgtagtaccgggtatgtttaagaaaacgacaatcttttccttttcacactcttaaaatgatatcaaaatctcattctctacacaggaaacccgtttatgttgtgggtgctgaacggtgtacatggaaattttctgacttccagaagactctccatggtagaggagctgttcgacctttgaccggcaaagaagat

SEQ ID NO: 194024 - DNA, 802 bp, Arabidopsis thaliana landsberg
atggaggtgaacactcgactgactcgagaagaacatccattccaagattcatctgcatggtttctacggtaccttgaccaccaaggcgactggcttgaaaaaactaggggaaacctggtcgttgctgcaacagtcatagctgcaatgagctttggggtaatggtgaaccctccaggcggtgtttggcagagtgaagactgttcctccaaaggccaaactacttttcaaaccagaacttgtgaggggaagcttgggacttcgatactagagcacaatccttcaaagcgtatcttctatcttggcatggtcattagcaatttggtatcgttttccgcctcaatgggtatcattttcctcgtcatcattggcttccgattcaggtactagatccattcataaaccataattatataatgtgttttcttcttaaacatttccttgcaaatagtcgaaataaatagtgagacctgtttactaattagtgaactaatattatatctatctgactatctgtaggaaccggttaataatgacgatcacggtcatgtttatggtggtggcggttctatgtatatcggcagccttcttctttgctgcggcgttggttcaacacgaggatgatttcatcgagaagattcttcaaatttatttgggattttgggttttgcttcctgttttagtaatcctgatccaattagtgcggtttttatggtgggttattaggttcatatgttgtggttgtggacgtcgaccacggtctactccacggttgctgcctttggctctgccacctgtccgttga

SEQ ID NO: 194025 - DNA, 916 bp, Arabidopsis thaliana landsberg
gaggagaaagtttaactgatcagacagcagagcacatttttggtgtctgtttggttgatgttgcgacaaagaagataatactgggccaggtgagttctagttgttgaatggtacctggttgcacttatacgtaacatttctcggtgaatattgatggcattttttttcattcataccagtttaaggatgatcaagattgcagtgcattatcttgcctgctatctgagatgaggccggtggaaattattaaaccagctaaggtgttgagttatgcaacagagagaacaatagttagacaaaccagaaatcccttagtaaataatctcgttccactctctgaattttgggattctgagaagaccatacatgaagttggaattttctacaagcgaatcagttgtcaaccgtcttctgcttattctagtgagggaaagattctaggtgatggttcaagctttcttccaaaaatgttgtctgaattagcaactgaagataagaatggtagcctggcactctctgctcttggtggtgccatttactacctgcgacaagcattcttggatgagagtctgcttagatttgccaagtttgaatcccctgccttactgtgatttcagcaacgttaatgagaaacagcacatggttcttgatgctgctgctcttgaaaaccttgagatatttgaaaacagtagaaatggaggctattcagggtaaagtttctctatcttaccatgtattattaaacataattgatgtgttctaaatctagagtgttgtcttttgaagaacgctgtatgctcaactgaatcaatgtatcactgcatctgggaaacggttactgaaaacatggctggcaagacctttatataatacggaactgatcaaggaacgacaagatgctgtagcaataatgcga

SEQ ID NO: 194026 - DNA, 554 bp, Arabidopsis thaliana landsberg
aacaagagagttaaaccaagtgttcatgctgaggataatcttaaaacaagaaaacaggttagtctttgcaacggtactgttttaaaaatttgtcaattgtcttgttatgatatttacaacggattttaaaagtacttttaatcagtgttttttactattctaggtgccgagaaagaggcagaaacaagttgatagtgctgctgttgatgttccaacaaggaaataggttagtatctaatttattatgattttgaaaattttgtttacaaggtattttaaacatctattttttttattctttttgataggcaaagagtaagaaaaggaaaattattggcaatgatggtgataacgctgataatgatggcgacaatgatgattttcagcccgctccgcaaagaaagagtaagcggggtacggttccttccattcatacccaagcacctttcacagctgagaagaagaagcatccaattttgcatccatttgcgaaagttgatgccacaagacttgagaaattggctgaatggaagaagtcaaggaaaaacaagtga

SEQ ID NO: 194027 - DNA, 336 bp, Arabidopsis thaliana landsberg
ttccatcaccgtgggaaagttgatcgttggtgtggggaactgtggacatggatggttaagttcaaagatactgtctttgccactgcattggaggtatgctggctgtttatggcctctctttttttttgtctgtctgttcctctcgcgaggtatgatctttggttgagtatttgttctgcttctctctcaatttaaggttttctaacccaagtccgttgtttctttcacaatagcctggttgtgtaggggtgaaagttcttgctctaaagtttatggagacttttattttactctttactcctgatgcatctgatcctgagaaagcttccagcgaag

SEQ ID NO: 194028 - DNA, 219 bp, Arabidopsis thaliana landsberg
atgagcgaaagtgtcttcaagagccttagaccttttggaagattattcggtatttcaaatctacaccattgcagcttcaaaacagtaagtgtctcgctggatgagaaattgagtgggatctccataaccttcttggagcttgagaaatccaacacaagctctttgatgtttttacgaagacacgtatcgacccacgaaagtatcttatcctccacgccg

SEQ ID NO: 194029 - DNA, 1941 bp, Arabidopsis thaliana landsberg
atgcaaggctcctcacatcaagtcatccctatattcgatggggagaaatatgacttctggagcattaaaatggcaaccattttcaggaccagaaaactatggtccgtggttgaagaaggcgtaccggtcgaaccggtacaagcggaagaaactcctgaaactgcaagagcaaagacgctcagagaagaagcagtgacaaatgatacaatggctttgcaaatcttgcaaactgccgttaccgatcaaatcttctcacggattgcagcggcatcatcatcaaaagaagcgtgggatgtgttgaaggacgaataccaaggatctccacaagtccgattggttaaacttcaatcgctgcgtagagagtacgagaacttgaagatgtatgacaatgacaacatcaagacattcaccgataagttaattgttctggaaaatcaattgacttatcatggtgaaaagaagacaaatgctcaactcatacagaagatactcatctctctccaagccaagttcgataacattgttagtgttctagagcaaactcgcgacttggatgcactaacaatgtcagaacttcttggtatcttaaaagcacaagaagcgagagtaactgcaagagaagaaagcacaaaagagggagcattctatgttcggtccaaaggaagagaatccggtttcaaacaagacaacaccaacaaccgtgtcaatcaagacaagaaatggtgtggttttcacaagagtagcaaacacacagaagaagagtgtcgagagaaaccgaagaatgacgatcatggcaaaaataagagaagtaacatcaagtgttacaagtgtgggaagatcggccattacgcaaatgagtgtcgctcgaagaacaaagagagagctcatgtaactcttgaagaagaagacgtaaatgaagatcatatgttgtttagtgcaagtgaagaagaaccaacaacgttaagagaagatgtttggttggtagacagtggctgcacaaaccatatgacgaaagaagagggatacttttcaaacatcaacaaaagtatcaaagtcccgattagagtcggaaatggagatattttcatgacaaccggtaaaggagatattaccgtcatgacaaggcatggcaaaagaatcatcaagaatgttttcttagtgcctggtttggagaagaacctattgagcgttcctcaaatcatctcaagcggctatcgggtacgttttcaagacaagagatgcatcatccaagatgcaaatggaaaggagatcatgaacattgagatgacgaacaggagcttcaagatcaagttaagttcagtcgaagaagaagccatgacagccaatgttcaaacagaggaaacatggcacaaaagacttggccatgtaagcaacaagcgcttgcaacaaatgcaagacaaggacttggtaaatgggttaccaagattcaaagtgacgaaggaggcatgtaaagcgtgtaatcttgggaagcaatcacgcaagagctttccaaaagaatctcaaacgaagacaagagaaaagcttgagattgtgcatacggatgtgtgcggaccgatgcaacaccaatcgatcgatggaagtcgctactatgtgctgtttttggatgattatactcacatgtgttgggtatacttcctaaaacaaaagtcggagacgttcgcaacgttcaagaaattcaaagcgttggtggagaaacaatcaaactgttccatcaagacgttgagatccgatggaggtggtgagttcacttcacgagaattcaatcagttctgtgaagatgaaggaatcaataggcaagtgactttgccttactcacctcaacaaaatggtgcagcagaacgcaagaatagatcattggtggagatggcaagatcaatgcttgttgaacaagacttacccctcaagttatgggcagaagcg

SEQ ID NO: 194030 - DNA, 127 bp, Arabidopsis thaliana landsberg
atgttgccagacatatgttctcacttaaccgataacaagcccgctggcgaacatattcccggggcgagcgatgacccagaccactatgccggtgccacacgtgattatgctcgaacgcctttgaaag

SEQ ID NO: 194031 - DNA, 199 bp, Arabidopsis thaliana landsberg
aaccgttatgcgtgctgtccaggataacttttgatccattggctaaggtcaggatggccttgttgctgcccggcttgatatctgcctcgtgggcagtgtgattagcagcgaatgtatctcctgttatgacaggtttattagtcaggaaaataatggatatgacaatgagaattccgatgacagcagcggctgcgactga

SEQ ID NO: 194032 - DNA, 66 bp, Arabidopsis thaliana landsberg
atgggtttcgttttgtcgtcagcagtctttggcggaccagaccgtcgtggaatgaagagaagcgag

SEQ ID NO: 194033 - DNA, 166 bp, Arabidopsis thaliana landsberg
agaatgtgaacctgcaatagggagttatgttcttggaaagctcggtgacaacgacggagtcaacaaccttatcttcgttctttctgatctccggattgatacgtccacgccttctgctctcacgacaccattctctgctgctttcgtcccacctctcccccggtga

SEQ ID NO: 194034 - DNA, 288 bp, Arabidopsis thaliana landsberg
attaccatcgtgctagaatcctactgtgttgtcattgaaggagaaacagagcttgcagaggccaaagatgtgtggactcatcaatttggaggactgcttctccaagtcatcgtctgctctacttggaatagcattgttctgttgttgtcatcacactatcgacggagaaacagagcttgcagggtctacattgtacacattttttatatctgtatcaaaggacgtggaatagcaatttatgaggacgagagatatgagactgagaaaaaacccattatattacactaa

SEQ ID NO: 194035 - DNA, 578 bp, Arabidopsis thaliana landsberg
atggatccggcgatgggaaaaagagtgatgatggatccagcaataatgacgatgatgattacacacctaatgacgatccacaatcgacatggttcaaggtttttaaacttttagcaactaggcttctttacatcggggtcaagagatcatgcgaaaggagcgtcaaacgcaaatagaagtttctcaaatttatcaacatatctcaagctaagaagcttcaactactggctaaagctaaagggaaggagcatcaaacttttgtggagtacacttgcctaggtaaggcctccagagatttctcacaaacctatacctcgtttctcacttggtgtttctttggctctcttacttgcatctccttcgtttgggggtaatggaacacctctaaaacggatagaagcctagccgacttgtggttggagataaacaagaagagtgtggttatccatgagtttaagaaagagatgagtgccaaaaatgctctctacatgcaccggcttgatgagattacaaaggttgcaaagcaaaatcaggaagatcttcaaaagatcgtggcacttctcgtatctaaaaagtga

SEQ ID NO: 194036 - DNA, 138 bp, Arabidopsis thaliana landsberg
aatgagcaactcaaagtcatactggagaaagcaaagatggggaacgccgccacaagccctaacaccgttaatggaaggaccagatccagacatgcaagacgaaagaaccaagaaggagagctcatgggaagcaattag

SEQ ID NO: 194037 - DNA, 213 bp, Arabidopsis thaliana landsberg
gagtttcctatcatcaatcatcaaggtgcatgcctcttgtctctcagctcaaacaaaacagtcacatgagtttttcgagatacatcagtgagtcacttgtgagttctttaaatacatatcttgtttacagaggaatcaacgtacgatgttgttgtccatgtgaagtctaaggagaagcaattactaataaataatgttgattcgagcttttag

SEQ ID NO: 194038 - DNA, 541 bp, Arabidopsis thaliana landsberg
aaataccttctcgtcatgatcgactatttcaccaagtgggtcgaggcggaatcatatgcccggatccaatcgaaagacgtccagaattttgtttggagaacattatttgccgccacgggcttccgtacgaaatcgttaccaataatggctctcagttcacttcacttcaattcgagggtttctgtgcaaaatggagaatctggctgagtacgtctacaccccgcaaggcaacagacaggctgaggccacaaacaaaactattatttatggactagagaagcgccttgaagaaaacaagggtgcatgggcagacgaactcgacggtgtcttgtggtcacaccgtacttctcctcggcgatctaccggtcaaacaccattctccctcgcttacggtatggaagctatggcaccgtctgaagtcggcctccccacgatccgacgttctatgtttgtccatgatccacatctcaacgataagatgctcctaacaaacctccacaccatcaaagaacaacatgacctaactctccttcgcatctag

SEQ ID NO: 194039 - DNA, 99 bp, Arabidopsis thaliana landsberg
atgatgttgaaccccacaggagctgctatcatccacaacttggccgactctgtagataagactcgtttcacatcggtccagctcctcgccggagcataa

SEQ ID NO: 194040 - DNA, 122 bp, Arabidopsis thaliana landsberg
atgcaggataagcagggaggttccataggatttagcttattcatattagggcttattcctactacaagctccaaggatgatgccactgcaacccaaagagcccaagatttctacgtcggctg

SEQ ID NO: 194041 - DNA, 223 bp, Arabidopsis thaliana landsberg
atgaatatgataactctcacgtatggggcgattctaaaagggagaaagtcgaaagccagtggagacagatacagaaagtcaaccagcacatcaacaaacaaaattaccacgcaagcaacctggaatcaatatgaagacaaattgttgcacgaagaaaaaggaatttcttactttctgatcgattttcaacaaaaagaagaaacacaaaactgtgaagtggcta

SEQ ID NO: 194042 - DNA, 1796 bp, Arabidopsis thaliana landsberg
atgaaaggaaccggatcgagagaaaagatcgcggacttgccttgtcatgctcacgcgaagttcaatcgagaaggagaagaccttcaagattggcgtgctggatccccacagaaaaaagtgaaagttctaaccaagttaagaacgtcgacaatttatctcattgggaattcgggacgaattataatgagagggtgaatgtagtgacccggtcattgactataggggcggtcgtggtaagaaattttgagtcggagttatttccaattttggcataaagggaatatgccaaggggttataaggtcttgggaaaagacttataattggaaatactaagtaaaattctcttacttgactaagtcagttttggtcatggaattgggtaacgctgtgaccctgccatgcgggcgtacaatggttgaggacggcctaacttgtggcctagatgattcttggaatggtcgaatttagagaaatatttgaagcataaattccgaaaatcgaggcaaaagcgtaagaaaagtaatcatatgtcggagagagaaactccaccttatttacaggatcgacgcaatgattatatctctgccccaatcaaaagaaagatattgcccatggtataagttaccttccttgggcgatatcgaggcaatgatttcagttatgagctaatccatgggcaagttacctcttttggacaaaacgaggtaatgatgagtttggccgcacaaacatcgagtcaatcatggagaaggagtgttgccatacgttgggcgacacaaacttcgacccaatcacaaggtggcgtgtcccatagggttggacgacgcaaactccaagccaatcggaggaaaggtgtcgttgtgggttttaagtcacccaagacgcgacatgtgtccgtcatatgtcaagtctcctcctctataaaaagaaccaaggctttggagcttaagtcattttcaccaagagcgaaagagaaatagtgagagagagagagtgctctgaaatctctggtgaagtgacggccgctcctaaagctgacggtagaggtggatgactgaattccgaatggagtagcagtttcggtgaaccactcgacgatcagttttcgaaggaagaggaagtctccgagatcaaccagaagttcccgatcgacgttgtcattccgttaagtcatcactctcatccgatccgcttaatcacagtggtgggacatgagttaccttatgtgcttgctttgatgattgtgtgcttgttgatgtgattgttgattgatcgtagaattgataagaattataatttacgtcatgtatgcttgatgctttaagtacgctttgtcgtagcttagttgcatgcatatagagtttatggtgttcgagtgtgcttccctgttttgttcgactcagagagacttggtcgctcccaaggggccgagtgttgcatgacgatgcaacggggatacatgtcgtggtagtcccatgtggtacatcgcttgtagacttggtggctactagcggattgttcacttggtttgatgggaaggatcgttcacatggccatatgattacattgttatcatttacccgtgcatccattatattgcattattaatgcatattgattgtttgttgcttgttgcttgactaacgtttattgttatgggttgggttgtttagcttctgagattaggcgccgaactcattgagtacttatattcatgattccaccatttctgttgcaggtgaccttagggggaaaaaccatagagggtcgttgggacaataggttcttggtgtag

SEQ ID NO: 194043 - DNA, 155 bp, Arabidopsis thaliana landsberg
gtttggatttcgaggaccctagggaatgtcaccttgtggccgttaagcgaattcttagatatttagttgctacaccttgctttgggatctggtatccaaaggggtctacctttgacttaattggatacgcagactccgattatgccgggtgcaag

SEQ ID NO: 194044 - DNA, 2025 bp, Arabidopsis thaliana landsberg
caataatagaggaacgatctacgaatgtgaaacagccgtggactaagacgaagaggaagacgaagccggtgatggttacatatttatctcttttgacaacttgttgtgacatagaagaatagtcaacagagtgggaactggcaactagcaagtaattactatttactgtaatgattagtgaattaataattatattttttaattgattgtttggttctaaatttctaatgtaaggattagtactattactattattatattatcaaactaaaataattgatttccagtgatctccgccaggctctctggctcgatctcctgattaaattatcttctctgacacagacacgctttttaacaaacacatgtgaaaattaatttccacctcatcatgtattgccagttcgataatgcggattcatctacataaataatattcaagtttggcaaaagaagaatatgtcatctagctcctttgcccaacttgagctcaatgacaaataaaattaggttattttgcatattcttgttggtaattcttcaaacaaataaaatatgtttccattcataattttccttagatctacaaatagtcataatttaaagagctttaaccatagttataagcttgttcaactcatctttttccttgtatataagattgttgtacatttcagattcatttagttagtaacatgatttacatgcttatgatcagatatattatttttagttatatattatcacaatatgttcgcgtcattattatagtcacacatcttcgcagcaaatacgtcttacctactctcattatcatggctgcgcgattgactattcaaacaccatttcatgtcatgtatgagcaaattgagtcttatgtaatttaatattagtcattatcgctttgccaataatgatgcatatgggacaacggtatttattcctatgtttataaatttaaagttagctttactaacagataagatattttaagatggtgtaacaaaaagatcaacaagaaaaacaaatgttcactttcacatcagcggtcaagtgacgactaacatttaatattctagacatcttcttagccctcttcttaattatcttgtagctctaacgggccagatattacattgggcttttgcgcatatttaactgttttaggcccaaaacaaatgtaattacctttttacctcactcgtcggcgatttactttttttaatcggggacttcaaaattcttgaagccgttgtgttgtcagagagagaagaaagagatagatttctcattttgggaaattagggttccaattttttcgaactaatgttcacgccacagagaaaacaatggatgtcaccggcaatgacgccgagaagcgagacgcataaaatcggcggtgttactaaccctagaaacgctgatagaaaaggaaaggcggttgctttcagtgatgacctagtaataccgactcttcctccgcctccgattggaacactgaccggacaaggcgtttctcgaggtcacactgatgatatggatatgggtgattggagaaggtttagggaagtgggtttgttgaatgaggcttcaatggggaagaaagatcaagaagctcttcttgaaaagatctctacacttgaaaaagaggtaacctttatcaacaatttgaatattctgctctcatgggttatgatgcaattggtaacgtttagctgtctgaaagttgaaatgagtgttttgactctttgttatggcttttgataagtacaaatatacaggctttaacctctcagaattggttcttctgtgcagttatatggctatcagcacaatatggggcttcttcttatgtagaacaaagagttggtttcaaagcacgcacaactaaatcaggcattccaagaagctcaagaaatccttaaaagggaacagtcatcacatctgtatgcattgtcgacggttgaccgacgtgaagaaaacttaaggaaagccttgggtctggaaaaaaaaagagtgcaagag

SEQ ID NO: 194045 - DNA, 656 bp, Arabidopsis thaliana landsberg
atggaagaactgaaccatgcaatcttggaacttcaagaaatggtaagagataccccagctttgaaattgaggattagtcaaaggaacctagtacaaaagaagaagactactctaacggtaagaaatgagtactcaaccttccatatgtcaagagaggatgcagagtttgattcatgcactgaagattcaaccactgaagatgaggacttctcagtttctctcttcaacctttttctgactaagctctgtaagagtcaagcttagtgactttaaacaagctcacttgggaggaagtcccatgtctatctttgtacatattgctttcttgttatttttgatgtttttgtttaagtgtttcagggaaaaagacttctagagaatttcaggccacactcgaccgtactactcggctacaggccgaatgtgggcttcaattgaccaaaggcccaacaagatgcagcactcggcccgaagccgagtcagaaaaagaagcccatcaggcccaacactgtactcgacacgcgcgtcgagtatgtcggccgagttcacacgtgcgaggtcaacacaattcaaattcgaatttgaattcgaatttgctgggccccaccaatcaaatcctgctccccaaagcccttcaaagattctgctgcaaatag

SEQ ID NO: 194046 - DNA, 2358 bp, Arabidopsis thaliana landsberg
gcctaacgtggaagggggttcgcttgaagatgaggaacaaattactctcttccgtttatcaaccttgttcaatcctgtaagattattctgtatatttctttcagaggtaattttcatataacattctcataatctcttgtgctattttccatttaggcttggtaatatgttcatcattcacctctgtcttctgttttcagctgcattatgatcatcaagtacttcttgattaccttatatctaaagatattggggctagctgcgcagagtacctgctgaggttaatccttttctcttaagaatttgcatatcaactgctccatcttgagtaataagattggatatgatctgttagtttgtgtgagaccagccatgttagctcgtactctagtctttgaatgatttctctagttcacaaattacgttatgaattttccaaacaaatacttataggttgattcccatatgacatccgctgttttttcctggtagatgcttgcgtgcagtatgtgattcatggactctatttgtggaattcccgtttgaaggaagtacagatgctccatctccgaagagaagaaaagttttgcctgagacttctgaggttgaacaaaactggagattacatgcccaggcttttgaagacgccaaagattgtctgctttcgttacaaaattcagttgttaagctacatcagaagaaactgtttccatacaacccagaggctcttctacgacggtcagtcttattttcgcaacttgtaaactcacctacgcatataaatcagctaaataaaccttcttctattgtgaggcagtttgtcaaggtttcatgagctctgactatcccatgagtaatatatctggaccaaaggtaaatcagttgcaaatatggattcaaaagaactgttatatgaaaattgtcatatgcttatggtttagcaaaatgttgtgatccttagtttgtgggttgcggtaattaggaagtcagattcaacaaattatacttctctgttagctgctagataagtctctaacctctcaatttggtgcttctcaggtgagattctctgagacagaacagaaggatcagatgccaacacaaagaagtctcctttccagatcaaatttcaaactaatcggctcaccagtagaagtgtatgtaagtttgagaatctcatgtctaatcgaattttcttggggtacttctgacacaagtgtagctgacatgagctgtgtttctgcagagagatcctacattctttggttggtgcagctgctatgaaacagagagcattatgttcttgcctccacaatccaaatctgaatggtataagatactttctagtcaagctaatgtgaaactgccccagccaattagagtaagcaatgaagtgtagaatatcaagaatcacaaatattgaaactctcttattcatatcatagatgtaactgagcccaaatcatacacaggtgtcatcattttacatttagttatatttcgctgctatttcttgtagcagtttgagaaagttcatgaggcttaacgagcataaccatgtgaccagcttcttcaattcgcttaacttcgtgaggctcgtagatactaatcattcacttctgaatctcctctggaaccacattgtcgccttcacagacaataaacactctcttcccagatccatacctttcctttgatatcagatcttcacctcccatttgcttagtgtataaccagcttggtttcatcaacgccatggctaattctaaatcctgcaatcagattaccaatcagtgaccacctgatctcagacaaactatgccataatcataactgtagtggactcacctctaactggcaattactatatgccttctccttcaagaaactagtaccgaacaaaactgaacttggtgggtgttctaatccttcctcgaatgtaaactcacagtccatagcgaaaccctctggtagtctcgtaaaatactgcaaacaaacagaaagtgacaagagattataagataagttcttaagaatggtaccaaacaagataagataagaagagactaatttcttttttcggcgacctcttgaatcaaaaccgccggaggagagtcatggtgcggcatgtaagcagagaggaagattccgacagagactttggtcggaaacctttccatagcaagagaagttccaatgccaccatagctatgaccaacaagaaccactttctcgttttcagggagagactccatgaaactcatcaaaggctctagatacgccgacaccaaacgaacctcatggagctgcctcgtgtcgacaccggagccaccaaggtcgatagctgtcacacggtga

SEQ ID NO: 194047 - DNA, 644 bp, Arabidopsis thaliana landsberg
atgcatacttgtacccggattagtaagagtaatacaaggatgaggaagaggaaaggtacccctgaattagtagcagctcttcttcatgatacttttcctggactgttggaaactccagctcctaaggttatcatgaagcttgttcaaacaaaattaggtgtgaagatatcatactccaccgcattgaaagggaaaaggcaagccgcttgtgatttaaaaggtagcgcggaagatagctacaaggatatcaattgttatttgtacatgttgaagaaggtaaatgaaggtacagtaacatatctgaagttggatgagagcgggaaattccaatacctattcatagctttgggagctagcattgaaggctttcaagcgatgaggaaagtgataattctggatgcaacacatttgaagaaagtatccatgtattcacgcgttagccgctttcattgcattcgagagcgatacaacaagaactcgaggtatgaaattacatgaattggttttaaagtattattgggcggaattgtgggcattggcgtattataggactatttatttagtcccggatagatcacagtgggatatcccggatgacatcaaagtgttgaaggtattacctctgcctcggaaaaagaagaagg

SEQ ID NO: 194048 - DNA, 166 bp, Arabidopsis thaliana landsberg
atgggatcatcagacgaagaacaagagaataacagcggaggggaaacagaattaccggaaatagacccgagggccgaagatcgggaactcaagaaccatttgctgaagaagtatagtggatacttaagcagtttgaagcaagaactatccaagaagaaaaagaaag

SEQ ID NO: 194049 - DNA, 1553 bp, Arabidopsis thaliana landsberg
atggatacaggaggagatgagaaacgtgcaagaagaagcgaagaggataggctgagcaacttaccagaatccttaatatgtcagataatgttgaatatccccacgaaggatgtggttaagagtagtgtcttatccaaaagatggagaaatctctggagatatgtacctggtttgaacgtggagtacaatcaatttctagactataatgctttcgtgagttttgttgataggtttctggctttagacagagagtcttgcttccaaagttttaggttaaggtacgattgtgatgaagaagagcgcactatttctaatgtcaagcggtggatcaacattgtcgtcgaccaaaaacttaaagttctcgacgttttggactacacttgggggaatgaggaagtccagatacctccatccgtttacacatgcgagagcttggtgtctttaaagctctgtaatgtgatcttgcctaatcctaaggttatatctttgcctttggtcaaagttattgagcttgatatagttaagttttccaatgctttggttttggaaaagatcatctcaagctgttcagctcttgaaagcttgattataagcaggagttccgttgatgatataaatgttttacgtgttagttctcggtctctactgagcttcaaacatattggcaactgttctgacggttgggatgaattagaagttgcaattgatgctcctaagcttgagtatctgaacatcagtgatcattcaactgcaaaattcaaaatgaagaattcgggttctcttgtggaggcgaagatcaatattatatttaatatggaagagctaccgcatccaaatgatcggccaaagagaaaaatgattcaagattttctcgccgagatctctagtgtcaaaaaattgttcatctcttcgcatactcttgaggtaacctttgtatttgcgcttaagtttttttggtttgctgaattcgttgttttggtgcttaagaaacataatcacccaacttttctttgcaggttatacatgatttggggtgtgaactacccttatttcgtaacctatcctccttgcacatagacttcgaagaccacaccttgaaaatgttgtccacctttctccagagctgcccaaatgttaaatctcttgtcgtggttaggattattttactttaattaaacaagaaactttaatctcttttatataatgctaatggtgaactatcatatgcttaacttgtgtttttcctatttggtttatacctgcaggaatttaaggattcctcaaaagaggacggagatagagttttatccatacctcggtgtttcttcacaactctcgagtatgttaagatagagaggccaatcacaggagaggcaaggggaatgaaagtagttagttacattttggagaattcaccaatcctcaagaaactgaatctgtgcttgaatagttccagagagaaatcagaatctgtcattctcaaagaactccttacaattccaagactctctacctcatgcaaagttgttgtttttgaacctcgtagttgttgg

SEQ ID NO: 194050 - DNA, 152 bp, Arabidopsis thaliana landsberg
atggtcgagctcggacttcttaaccttctttacttcttcgattggagtttacccaatggaatgactattgaagatattgacatggaagaagacggagggattcgtatcgccaagaaagtccctcttgttctcataccaacttctcatcgctg

SEQ ID NO: 194051 - DNA, 95 bp, Arabidopsis thaliana landsberg
atgggccgcgtgctacggcgtggaagttgggcctccgcttcaagatttgtatctgctgatgctgtacggttcgccggagctggacgtgtaacaag

SEQ ID NO: 194052 - DNA, 152 bp, Arabidopsis thaliana landsberg
gtgttctatggagagggacaacaatgaagatgaggagacattttggagcaaaagctgaagaaaataagctaaaggacgaattcacttttagatccagtcgagagagtcgatcgacaccagttgtggcccagagaagtccatcacgcttttaa

SEQ ID NO: 194053 - DNA, 516 bp, Arabidopsis thaliana landsberg
cctcggagcagcgtgcccgagccgaaggtacgccttggccattttcggttttcgtttcagcttgtttcctccccctgtgtttgagatctttcgttctgtctattcgcagaactcgagtccgcccttgatgagtccaccaaggcgcttgccagggcggccaagcagagggaggccgaccacgtggccatgtccgaggccgtctcggacttctgccgagtccttggctccggcgacgttccctcaggaagctcccctcaaagtcgctacagccttggcgatcatgcgcgcggcagactccgtgaggcgctacaccacggcgtcaggcgggccttcgccgtgctcgcttcccactacgtcgtggacctggagcgggtcagcgaggcggtattgccttcctgacgaagatgaagccgccctggcagaagtccggaggctcgatgcggccgtcgcgggcccaagcgcggtgctggcgaccaccttcgaagcggagatcctccacgttgcgccgtcgtctga

SEQ ID NO: 194054 - DNA, 337 bp, Arabidopsis thaliana landsberg
aatgctgcatggactccagttccacagttcggagggtgggaccaaaaaggaccaaatgatgctacaaactactcggttgtcttttctaaagctcgcgctaataggaagcagaacaaagctggtgtgagacattctagtttgggaagcgaacaagaactcatggtaagtgttcgtcgcaaccaccaacaacttcaccatcgccatgaaactcaagacgatgaccctgtcatggtaattaacatctttctctctacttattcttccatggattctttagttcatatgcaccttgtgatgatccttttccccttagtcaacgcgcatggatcatcacaag

SEQ ID NO: 194055 - DNA, 309 bp, Arabidopsis thaliana landsberg
atgccgatgccgggcatgggttcgaccgcgatcggcggggtggtgcccgcgcgcggcgccgaacttgccatcaccgcggccgcggttgcggcacaggtggcctcgcccggcgtggacgattaccaggcggccaccagcctgcacgccgggatccccgcggcgttggcggcagcggcacgtgactcgcgcggcgccgtggcggtggtgtttgcgctggccatttccgaccaccccgatttgcaggcgcagcagatccagaccgtcacgcaagatttcgacgccgcgctgggcgctgccgtgcacagtcta

SEQ ID NO: 194056 - DNA, 299 bp, Arabidopsis thaliana landsberg
acctgagagtcaggaggacattaggcgcgactaccaatagcggccgcacgggtacattcacgcccacgactctgaacgacggccgcaatgtgggcggagcggccaccgtgaacggctcgaaaagtacgttgctgctgaatgagaactatttgacctacaacaaaaaaataggcagcgcgcacgacctgtcggtaatggcgggctattcctatcagaaatcgtcgagcgaaacttggggcggctcgggtcagtcgttcattaccgatgcggtctcttactggaatctcggcggctcgtcg

SEQ ID NO: 194057 - DNA, 182 bp, Arabidopsis thaliana landsberg
atgatagagctaaaatatcatgaggaaaatatgccaacaagaacttacacaagattctcggaaaaaacaaggctcctcaaaaatcttgtgactggtgaaaacttgacaagagaaagccaagaaattgtaccaaaagaagacaagaaattggaagaaagaagaagaagaataatcagtaatag

SEQ ID NO: 194058 - DNA, 80 bp, Arabidopsis thaliana landsberg
aacgggacctcaaaaagatgaagctgacgctgccagctgcaggcccgaaactgctccagaccttcctgattgacaactga

SEQ ID NO: 194059 - DNA, 113 bp, Arabidopsis thaliana landsberg
atgtccgcagccagggactcgattcgtgaaggaatagaactggagggacctttttgcacgatgttagggactattttgaatagtgtcttggactctttcgggttatgccaaag

SEQ ID NO: 194060 - DNA, 329 bp, Arabidopsis thaliana landsberg
gtaagccaatggtgtgccaaacatttaaacatgtctgttatgtccatggaggagtctcaagaggaagagcattccaacattttctttcaggttatttgatgctttttggttctggaagtaggattctgtcgcagcttatggtttcgaagggactgagttattcaatcaatgttatgcagcttcttttggattatcttcgtttttctgcctcaagctttactgctattggaaaaacttgtttcatgactgatgatgcctcagctgttacagttcataagtttgtttcagagcagctcaatttgacaaaggagttgataatgaattccaag

SEQ ID NO: 194061 - DNA, 445 bp, Arabidopsis thaliana landsberg
atgggagaggttcaaggaactacagtaaaacccaatccattgctgaaaggtgagccaagattggctctttggcatggcctcttacagagaaccagcgatgcgagacagattctggatagcttgaaaatcgacagttttgagtggcatccctacacaaaaactgagaaagagtgggagtttcctaagttttaccccgagaaagcggtgtggattcctgctagtcccaatcttgatgttgaatttgtctcctttgctcgatgcattaaggtgtctcagcttgttggaattgacaatgtggagcattactttcccaatcgagtggcttcacagtttgggatgcttcaagatgttccttgtgctgttaaccagaacaacctctcacacgaggcagcttggaatgattacaataagccaaataacgatttagcattattcattccttcac

SEQ ID NO: 194062 - DNA, 110 bp, Arabidopsis thaliana landsberg
atgacaggtgaatacgttttccacatttgcagctttttgtttaagtggatgtggatgcaattgatggaactttttacgagaagcaaatgcatatttttcgtgtaggatga

SEQ ID NO: 194063 - DNA, 145 bp, Arabidopsis thaliana landsberg
atgaagacgacgactcggcttctcgatctaacagcggctatggttctagttgtctacgtgtctttctctcctccgctcgtttccggcgacccagggcggcgtgttagcatgacactggttcgagacgccgctgctctcggtgctt

SEQ ID NO: 194064 - DNA, 238 bp, Arabidopsis thaliana landsberg
atgaagtccgtacctgaacaagtcgacgagctaatagatcttatctcgtctctgttgcaaactgtggatgatgctattgggagtgaaggagatgaggtggacgtgaaactagacatggaaagcctcgaggatgatgtgaagacattaacaacgaaaatcacggaggttggtgaaactgtggctaaatatagcaaaattatcaaagaggcgagacttcacgttttggagaagatcactg

SEQ ID NO: 194065 - DNA, 498 bp, Arabidopsis thaliana landsberg
  unsure (1)..(498): unsure at all n locations
catagtgtgtctgttaacggcggaacggataaagtaggttacctgttttcttttggttacctcgataacaggggtacgattgaaaacaccggcaccaagcgttaccagctgagggccaacctggatgcccgtgtgaataaattccttacagtaggaacgcagacatttgcttccacgcaattgtttgannnnnnnnnnnnnnnnnncgcatttaatttcctgcgccagactaccccgggactggttccttactggaatggcaggtacggatttccgcaggcggctgaagagtcttccacagccaataatatcctgggcttcctgaacaacactgcgggcgatgaccagacctctcgtttcaacacaaccctgtatgcaacggtacatatcctgaaagggttgagttttgaaagccggtacaactaccagatcaggcagaacgattacaactcgcatacaaatgcaggaccgagtgaaagatggaattttgcccaatga

SEQ ID NO: 194066 - DNA, 312 bp, Arabidopsis thaliana landsberg
acttaacataccattgtatcttgtgaccgatcctacttctctcattctcctcagcccgccaaacacttttatacaaccacaacgcgacggcggcagtaaaactcggtggcatcggctcgtagttgtatctcccttcccctcactcaacatatctctctgcctctctcttctcttgtctttgctagggttcttacttcttcattgacacacacacgcacgtagtaaagaggagaagaggagcgtgtatgcttttgatgagaattaggcccaaattaagcccaaatagatttgggtcgttacatccatatcatg

SEQ ID NO: 194067 - DNA, 582 bp, Arabidopsis thaliana landsberg
atgtctgatagctcaagctcaacctcacttgcggatccacatcacgattatgaaaatgcctatgatattcctaatcattgtttttgtggtggaagagcactgcctaaaccttcttggacaacgacgaacccaagaaggctttctgcacatgtgagaatgtcgatggaagtgtttgttgatttgggtgaatattttttttgaattgtgtttgaattttgttttgaaatttttgttcgaatttgttttgaaactgggtagattatggttgaattttggtaggatgggaaatgtcacatatggaagtggtgggatgaggctataatacatgaattaattaatagaccctaagttgaagagatgttatgcggatgggcgatgtggtctgaatggaatgaatttgtgggaggtgactacaagtgttagagtcatgctgccaaaggaggaagaccaccgtggaaaaacagaaagagagagaagggtgaagcaagggaagtgacaaaattgagtaaaagaggcaccaaaatagtaagttttttggcttttttaatgatatacctcgattttcaatgcttttagctatga

SEQ ID NO: 194068 - DNA, 259 bp, Arabidopsis thaliana landsberg
attatatgcatcttcgcgtttaatatccattcgtgaggagaactttgacgatcatcgagaggaactaaagaacttagatttgattgagattaattctcgtaccgcttcagccattccaatcctatcccttcgatattcttcagaacactttatccccacttgcaaaactagtctcaaccaagttgctgcctcctctgctcgtggaacacgacaataccgactttgtgtagccgtggaggttataaccgcctccaaatga

SEQ ID NO: 194069 - DNA, 231 bp, Arabidopsis thaliana landsberg
cgccgcctcccttccaaaggcttcgagttcggccgtcacctggtgcgatttaactgtcaacctttcaattgatggtttatatggcagggttttggtggtgaataccaatttgccagttctctgcgaggagccgacggttgcgacttcaccggcgagcgaaccctcgatcgtcgacgccacaaaacaagtcgtcgcttccaacgaggcgacttttttggtcgtttccggtaa

SEQ ID NO: 194070 - DNA, 1135 bp, Arabidopsis thaliana landsberg
  unsure (1)..(1135): unsure at all n locations
gtttgcaccacgtggctagctgtctctcgctccgaccatctatggcaactactatctcgccaagtttgggcaagaacacatttgatgcacgacacgtggcgggacgagttcatctaccgtcatcggacggctagaaacttccggacgcgtactcacacctacttcactctccaatttgacccgtctgatgtggacgagcctgatagtctctcttgccgttgtctcaccctctcagacctctacttagccgcagggttcgccgacggaaccgtccggctttttcttttaaacaaccgactccacgtcaggaccttacggccacctctacgtgaccgctttggnnnnnnnnnnnnnnnnnnnnnnnnnnnnnntatctccgactcaaggctcacgttcgctacgatggacggagacatccacgtggcggaaatagacggtggttggtcacacacgcacggcttacgcaggagatatagttaacgacggtgcgttggtagatttcactggctgtggacgttggtgggtcggtcttttcgcgggtgtgccaggtcgtgcctttcacatatgggactgtaacagcgaagagacaacattcgtcggtggtacactcaccgaccctgaagctgtcatgggatggcacacgttaacagagctaacaacgtcccttggccgtctcagaatctccggtaacgagacggcggtagcatgcacgagatggagaatcatggtgatcgatctaagaaaccaaggagtgatcatcggagaagacgaagagcaacgtagaggactaatagtgacaggcttcgatgccaacgacgaagcgtacgttagattggacagtagaggaaacgctagcgtgcgaagggtgaacacgcaacaaacggtgtgtgagttccgtgttagtggagcggcgcagagaagagtaatgggttgtgttaatagactgcacgcgctaatgtgcgcaggtggtataatgcgcgtgtgggaggtagagagaggagagtatctgtacagtattagggagagagtaggagaagttgacgccattgttgccgatgatagacatgtggcggttgcgtcagcttcatcaacggctcagagtattatacatctatgggatttcggtgcactgtag

SEQ ID NO: 194071 - DNA, 160 bp, Arabidopsis thaliana landsberg
atgtctatggatgttaagcttgctctgcaagagatgaacaaaatacctgagctgaagaatcttgaatctggactctggaggaagcagttgaacgagtgtaagcagcaatactcccctttgagcatcgagaagcgtgcaggggagcatataactaccactg

SEQ ID NO: 194072 - DNA, 921 bp, Arabidopsis thaliana landsberg
aatgccgatttgaaatcttgatgtttggttttgtggcaaaactcaacctttcaatatatattcccaaaaacctgaagttgttaaggtaaaattttgtttccgcaatagaagagattctttttcttcagtatcagaaattttttatcatcctggctctacttaaagttttgtggataatcagttaatattttatcagtagctgagttcagtatccaatttgtacaggctatattatgcgcgggactgtgtcctaatattgtagagggattagttaattaaccgtttaacaaagccagcggaagaaacacagcgttatgcagtatggcatgatggcaaaagagaagtccatatccatcgaacctctattaattaaaatcaactttcttgttcttgtaggttgaaacaaagaacgtagtatatatgcgagatacaaccgttgtttctcctttctccattctactttttggcggcttagtgaatgttcatcatcaggtactgttaattatgtcttactgtcagcgaaacatcccgaacaaatgattaaaaaactaactttatcacacagaaccctggccttaatttctaatacaatgcttgttggatacgtaatctatattctctttacttcactttcagtcacaatttttggatggttgaagcaagcagcaccagctcagaccgcggttttgttcaaagagctccggttaatcctgcattctgttctcaaagatcttatccgaaaacctgaggttacatgttcaatccttgtttgatctacttggttaagtagaagtagctcatgactaaactctcctatctcttcacgtttgtgtttttcagaaatcaggtattgtccacaacgaagtcgtcaaatcgatggttcatcttcttatagaagaaggaaaaccgcaacacaaatga

SEQ ID NO: 194073 - DNA, 399 bp, Arabidopsis thaliana landsberg
atggagagcggcgattacgatgttgagacgaaaagagagaagcttaaatcggttctctctcagctccttgctgatccgattctcgccgacgttccgaggaatccaacactttctgatgtcgtcactcttgtcagccttgagaagggaagcgctatgcgtctctccgtcgtcaagctcgacggctcctcccttggtacatatatacttcgtttgggcattatgtcgaacaagtggtgtgcagcattgtaaaattacatgggtttcttacttgtttgcttcctcattgcagatgtggcggtcatgaattcagctactttgaaagatctgaagcttttgatcaagaagaaagttaacgaaatggagcaagcaaacatgggtcatcgccatatttcttggtaa

SEQ ID NO: 194074 - DNA, 1236 bp, Arabidopsis thaliana landsberg
atggaacccatcgtaagctatatatctgaagggaacttgccctcggacaaatggaaagctcgtaaactaaaagctcaggctgcgcgtatcgtcttagtagatgaaaaactttacaagtggcgattatccggaccattaatgacatgcgttgaaggagaagcggtttgtaagatcatgaaggaaattcacggcggctcgtgcggaaatcattccggggggagagctttagccattaaaataaaacgccacggattcttctggccaacaatgatcaaagactgcgaaaactttttaaaacgatgcgaaaaatgtcaaaggcacgcgccaacaatccatcaaccggccgagctcttgttgtcaatcgcctcgccgtatccattcatgcgatagtgcatggatacaattggacttatgcatccctcaaagcagaaaaaattagttctcgtcttgaccgactatttctctaaatggatagaagccgaatcttacgccagcataaaggacgctcaagtcaaaaactacgtgtggaaaaatatgctatatcgccacgggataccttatgagatcgttacggataacggctcgcagtttatatcaacccgcttccaaggcttctgtgataagtgggaagttcgacttagcaagtcaataccacgatatccccaaggaaacggccaagccgaagccgtaaacaaaaccatcctcgacggattgaagaaacggctcgatgctaaaaagggctcgtggtccgacgaactcgaaggtgtactttggtcgcatcggacaactcctcgccgagacacaggataaacccctttcgctttagtctacgggatggaatgcataattccggccgagatgatagtgccaagcctacgacggagtctatcccccgagaacacccctgataacactcaaaggctccttgacgaactcgatctgattgatgaacgaagggattcggccctggttcgtatacaaaattatcagaatgaaacggctcgtcattacaattcaaatgttcggcaacgaagattccacgaaggagatcgggtcctccggaaagtttttcaaaacactgccgaaccgaacgctgggaagctcgtgacgaactgggaagggccatacctgatctctaaggtcgtccgacccggagtatatgagctcgccgacttaaacggcaaagtcgttccaagatcatggaacgcaatgcacctacggaaatactacaactaa

SEQ ID NO: 194075 - DNA, 198 bp, Arabidopsis thaliana landsberg
gatgagaatcgaagatctgaagagagagagtggatgggtgaaaagtatttgatccattactttgactacagaacaggagataaggattatatgatatggggtttaactgctgggattttgatcagagctgcatctgtgacttatgaaagaccacctgcttttatcgagcagtgccctaagtttaagtaccctaaaatg

SEQ ID NO: 194076 - DNA, 330 bp, Arabidopsis thaliana landsberg
atgccaaatgccctgaagttgggtgaggtggccaagcgctttgtggatcggcgccgcccggtgctgaaagcgcaggtgaccaacctggccgatgaaattgcctacaacaatcatgacatggacgatggtttgcgttccggcttgatcacgctggaacaggcggccgaggtgcgtttgttcaaacttcacctggaccgcgtgaaagcccgtcaccctgggttggcggggcgtcgcctgattcacgaaaccgttcgcggcatcatcaacgcgctggtcggcgacttaatacaagagtctgaaagaaggcttgcgcatcacaagcccggcagt

SEQ ID NO: 194077 - DNA, 336 bp, Arabidopsis thaliana landsberg
atggcgaaatcgacggcggaacgaatgcggcagtggcgacagcgaaagcacgccgatggcctggtgaccgtgaccttgaccgtgccggtcggcgacaagcgcttcttccgcgaagtcgccgccgaggcttgccgacgcgcgacatcggaccatgtcgccgccgtcgatgccgtgggtgcgccacccgtgcatcggctgacacgtgcgcaagagcgtctggcgtaccgctgggcatcccgctcaggcctgaagaccgacgtctatcgttcggggatcaagctcggcggcctgctggcgatgaatatcgcgctggagatcaaccgtatggggtttccg

SEQ ID NO: 194078 - DNA, 296 bp, Arabidopsis thaliana landsberg
aatcgacccagttgaagaaactcaaaagcttagagggatcatcgacgcgtttggatcgtaaaacggagagaactacttctggatttatctcgattgaaagattcgaagataccagagtgtcacgccagttctcttgcttgagaattcccgctatttcagctgatgcgtcggaaagtttctcaacgttaacggaaaacgaccggaaaagtaaaaaattcgctctcgtgaccaaagttctcttcctgaacaacatcgatcccatcatcaccgataccggagatcctcgtcggagatga

SEQ ID NO: 194079 - DNA, 511 bp, Arabidopsis thaliana landsberg
gagcaggaccatcagggttatgtttcggcgcgagagctaaagaaagaaggacataaagtggtggtgatggagcaaaaccacgacgtaggaggtcagtggttataccaaccaaacgtagatgaagaagatacattgggaaaaaccaaaaccctaaaagtacatagcagtgtttactcatccttgaggttagcttcacccagagaggtaatgggtttctctgatttccccttcatcgcgaaggaaggaagagacttgaggagattcccggggcatgaggagctttggttgtatcttaaggatttttgtcaagtgtttgggttaagagagatgattaggtttaatgttagggttgagtttgtgggaatggtgaatgaagatgatgatgataatgatgtgaagaaatggatggtgaagagtgtaaagaaaagtggtgaggttatggaagaagtgtttgatgctgttgttgttgcctctggccattactcttatcctagattgcctacaattaaag

SEQ ID NO: 194080 - DNA, 91 bp, Arabidopsis thaliana landsberg
gtttggtcaagtcaattacgaggatccacacttcaatgtaggcttgcccgtgttcagtattcatggaaaccatgatgatccagccggagtg

SEQ ID NO: 194081 - DNA, 89 bp, Arabidopsis thaliana landsberg
cctagtaagattacgcatttgtaatgtctatattcgttttgagaagggacgagaaagtgttggttatcgcatcgaaaatggatcggaat

SEQ ID NO: 194082 - DNA, 402 bp, Arabidopsis thaliana landsberg
atgaatcataagatcatccctgcctgccttgtttttttttgtcttactcatgctacacgcgcggagaagggaccgaagggaaagtatgcttactccggaggattcaccggggaaagcctgaccataaaaccaggcaacaggtttgtatatacaagctggtcctgcaccgggggatcccggggctcgggccggtatctgctggaagacaacagtctttacctgcggtttgacgatacaaagcctgaaactgacttcctcccaagggtctcctatcaatcatctaccggtgactcgacagagctctgccttagtgtctgggatcaggatgacaaaacctatgtagatgaggatgtcgttttttatatcatacgaaaacaagatcaacaattaataacgggtaca

SEQ ID NO: 194083 - DNA, 382 bp, Arabidopsis thaliana landsberg
atggaactaattcgaaaggaggacttcggtcacttgtctccatcaaaggtcagtcgcagatggttaactcagagatctgtgatttttgaatctttggttttatgagcttgtaggaatcatgtttgtgttcatctcttttcgttaaattagcagtatagctcattggttgatacatgcttcttcatctctgtgctcttatcgtatcaaggtgttagtcaactcaaggaaaagtggagtgaatactggaatcctagaaaaactaataagccggtgtcgttatttatttcaccaagaggagaacttgtggctgtcacttctggaaatcacgttactatcttgcgaaaggatgatgattacaggaaaccttgtggcaattttacat

SEQ ID NO: 194084 - DNA, 322 bp, Arabidopsis thaliana landsberg
atgtctgtgccggtggcgaccgcagcctcgctggaggcggacctggcgcagttgctgcagctgcagaaagcggcacagctcgacgtgcggcttgccacgcagccggacggtgtgccatggcccagccacgccgccgcatctgtgcctgatgagactacgtcagttccgtttggcaaaggtgttcaacagcgactcaaatactttttgctctctctcagcgcggaggaagagcctgcggcggtggccatggtccaggagctgcatgagcgcttcaccgagctcaatgcgcggctgcaagcggttgcacagcaccagcaagttg

SEQ ID NO: 194085 - DNA, 216 bp, Arabidopsis thaliana landsberg
gatccagttagtaatgctgtgaaatgttatgtggtatctgatacattaggcaacctattcttcaggaacgattacaattttggtactggcggttcagtatgctacgttcatatactcgggggacattatttggctagtggtaaaggtttaaggaaacttcagctcccattgatggagactaagatggagcctttgataccggatgatatagtctag

SEQ ID NO: 194086 - DNA, 2338 bp, Arabidopsis thaliana landsberg
tttcctcgcaattgtcttgcaaatttgcgaaggaaatatacgtcgtaaagtttgcgacggaatagcgagttggtcatgttccctcggagagatctattcgtcggcgaagaagaggtttgtcggagagatctattcgtcggcgaatttgagatttgtcggagagaacaattcgtcggcgaatttgagttttatcagagagaacaattcgtcggcgaatttaattagatttgtcaaaatgaaagtgaaatcctaattattcagtaagggtaagaccgttattttcgacattagaaggggcagttttaaaaaaggtcataaggaaagggcattgttgcaaaaggttattataaaaagggcacttatacaaatcttcattttgattgttatatctaagatttcacatgtagaatatcatcccgtattaatatcgacccaaatcattctgaccatataaccctgtcctatgaaattaaacatcattttgtcttagttttataaacttcaaatatttataataagactcgcaatcatagaccctaacccgcaaagactcgcaactccgtcgcaaaaattggtacagaataagttatcgtcgcaagtgcgtcgcaatttgcggggaaactcagtttcccgcaaaacccttgcaaatttgcgacgttttcgcggggaatcatgacttccacgcaatttcctcgcaattgtgtagcaaacgtgcgagggaaatattcgtctcaataattgcgacggaatagcgagttggtcatgttccctccgagagatctattcgtcggcaaagaagaggtttgtcgggaagatctattcgtcggcgaagaagaggtttgtcggagagatctattcgtcggcaaatttgagttttgcggagagaacaattcttcgtcgaatttgagttttatcagagagtataattcgtcggcgaatttgagtaggtttgtcaaaatgaaagtgaaaccctaattattcagtaagggtaagaccgttattttccacaatagaaggggcagttttaaaaatggccatcagaaaatggcattgttgcaaaaggttattagaaaaagggcacttttgcaaatctcccttttgattgttatatctaagattttacctgttgaatattatcccgtattaatatcaacccaaatcattctgaccatataactccgtcctatgaaattaaacattattatgtcttacttttatataatttcaaatatttataatatgtaaactaacgaatgttactgtaaatgataaccaaaacattaaacaaatagtaaggaaatttaaaacgtgttcacctaacctgcgaatactcgcaactccatcggaaaatttgctacaaaataagttatcgtcgcaagggcgtcgcaatttgcagggggtctcagtttcctcgcaattgtctttcaaatttgcgagggaaatattcgtcgcaaagtttacgacggaatagcgagttggtcctgttccctcggagagatctattcgttggcgaagaagatgtttgtcggagagatctattcgtcggcgaagaagaggtttgtcggatagatctattcgtcggcgaatttgaggtttgtcgcagagaacaattcgtcggcgaatttgagttttattggagagaacaattcgtcggcgaaatcaaagaggtttgtcaaaatgaaagtgaaaccctaattattcagtaggggtaagaccgttattttccatattcgaagggacagttttagaaagggccatcaggaaagggcattgttgcaaaaggttattacaaaaatggcatttttgcaaatctcccttttgattgttatatctatgatttcacctgtagaatatcatcccgtattaatatcgatccaaatcattctgaccatataaccccgtcctatgaaattaaacattattttgtcttagttttatataaacttcaaatatttataataagagaaccaacgaatgttactgtaaatgataaccataacatagaacaaatagtaaggaaatttataacgtgttcacctaacccgcgaagactcgcaactctgttgcaaaaattgctacagaataagttatcgtcgcaagtgcgttgcaatttacgggggaactcagtttcccgcaaagccctcgcaaatttgcgacgtttttgcggggaatcatgacttccatgcagtttcctcgcaattgtctcgcaaatttgcgagggaaatatttgtcgcaaagtttgcgacgcaataacgagttggtcctgttccctcggagagatctattcgtcggcgaagaaaaggtttgtcggagagatctattcgtcggtgaagaagag

SEQ ID NO: 194087 - DNA, 522 bp, Arabidopsis thaliana landsberg
atggacaacttgttccaacgaagtctcgaggatctaatcaaaggctttcgtctccagcttctcggagaatccaatttcatttctagagccgttgaagaaatccgccgcgagatcaaagccacagatctctcaactaaatccaccgctcttcacaagctctcttacctcgccgcacttcacggcgtcgacatgtcttgggccgcgtttcacgccgtagaagtcgtgtcttcttcacgattccaacacaagaggatcggttaccaagcaattactcaatcattcaacgatcagacctcggttatgcttctgatcactaaccaggtgagaaaggatttgaatagtgctaatgaatacgaggttagtctagctttggaatgtttgtctaggatcggaactcatgacctagctagagatttgactcctgaagtgtttactctcctgggtagtagtaaatctttcgtgaagaagaaagcaattggtgtggttttgagggtttttgagaagtatcatgatgctgttaag

SEQ ID NO: 194088 - DNA, 49 bp, Arabidopsis thaliana landsberg
atggatgcaggacgatacagttgcgaccaaatggctaaacgatccagct

SEQ ID NO: 194089 - DNA, 225 bp, Arabidopsis thaliana landsberg
tttctcaagcttgcagattcctacggatcatactctctttcctcagtggcaacagttccacaaatcgggataacaatcaccgtcaacacgacacagatcaccggagctcagcctaaagtatctacaacttcaacagagatgaatacacgagtttgcttcacgattcacagtacctcttcaagatcatgctttgatgaaaccaaaaccagacagtctactttgtga

SEQ ID NO: 194090 - DNA, 690 bp, Arabidopsis thaliana landsberg
atgaatacctccaccgtatcgccgccgtctccggcatcatcaatttcgttgtcgcaatcggcgtggctggaggttcgtttgttctacgtccgtatcgctccttgcgtcgttgagaacgtccctgacttcctcaccctccgtcaccctcgtcgcgaaaccggtgcttctcttgaggttaacggcgttcgcgttccttcgtcgcagacggcgtcgcttaaactccgccgtgacagagtcgaccgggaatcgtcggaggtgacttacgtgagcactgagaccgttcgcgttaccggatgcgttgatttcgaggtttatgataacgaggatatggtcttgtgtgggaacctagatagaatcgaaggtgcttggaacaatggaactgtgagtgatcccaagactggatggggcatggattgttacattgctatgggaaacggacacgtgtcaggtccttctgcctctgtgtttttccagccaaagtttggagtctcgtctccgtccgtcgaggtttatatagctggttgttgtggtggtgtcccggtgatattgaccaagacgattcaggcgagtccgaggaggaaggtggctaggcacgtgacactcgacgctatccctgaggatgaggaagttggcaaagagcaagacattggtaccattggtgatgaattggcccgtcaaagcaaagtacag

SEQ ID NO: 194091 - DNA, 180 bp, Arabidopsis thaliana landsberg
atgcgtattttccgcaatacatcgtttaacgcaatcatcgtttatgcatggtttcatcggcaccgaatatccgcaccattttcctgtgggttctggtacttcatgtattttgaatccatttcctattttcatctctgcagcttttatcgaaaccaatatagcgaatcgcaacgactatag

SEQ ID NO: 194092 - DNA, 349 bp, Arabidopsis thaliana landsberg
atggacaacgccaccaagttcgcctccggacaagaggcggtcgaggctatcttccgaaaggacaagcagccccagggtcgcccttcggaagatgcccccgaggcgtcaactcagcgcggcgccaagaagaagggcaagaagaagtcgcaagcaaaacgcgacgccgccgacgcggaccttgtcgccgccgccgagtacaagaaccctcggaagccccccggaggtgccaacctcttcgacaagatgctcaaggagccgtgcccctatcaccaggggcccgtcaagcacacccttgaggagtgcgtcatgcttcggcgccacttccacagggccgggccacccgcggagg

SEQ ID NO: 194093 - DNA, 96 bp, Arabidopsis thaliana landsberg
gagagaaagctcaaatttcgcccccacgatcgaatgtccgtcgaagttttgatctatcaatttattttttttatcggcttaagagcaaattttata

SEQ ID NO: 194094 - DNA, 158 bp, Arabidopsis thaliana landsberg
agaatagccaggacatatcctacggcggtgcaccttcttccaagtgtatttatgctaaaccggatggtactgctgatgagtcttccacctccaaaaagatctgtgttgaacccatagacttggaaaagtcaaacctagaatttttgcttaattcttaa

SEQ ID NO: 194095 - DNA, 313 bp, Arabidopsis thaliana landsberg
atggctgaatttgagagggagtatgatacttttaagggtgagatttcctaaagcgccctattgtttggaggatacaaccgtgaaagaaaaatgggctaggtgttgtttcccagtgaaccgatacaatttggacaccagcaactgtgtggaatcgttgaattctgtttttcttaatgcaagaaagtattctttaatactcatgttagatgccatcttggccaaagaagccgcttcaggatctaatgataataagtttgtgcctttagtggagaacaacttgcatgatttatgggttgacgctgaaaaactaaaa

SEQ ID NO: 194096 - DNA, 196 bp, Arabidopsis thaliana landsberg
gttgctactttgccttaaaagcgtggcacgcgcagcaagcaggcgcggctgcagttcttgtggcggataatgtagacgagccattgttgacaatggattcaccagaggagagcaaagatgcggatggtttcatagagaagctaacaatcccatcggtgttaatcgataaatcatttggagatgacttaagacaagg

SEQ ID NO: 194097 - DNA, 153 bp, Arabidopsis thaliana landsberg
gtggtccggcttggtgtttgcggattgtttgtttttggtgacggtccggtcctcggcccttgggttgtagtgtgcttgcgggctctttgtgttttggttatgggccccgcgttttttgttcgtgctcttcggtgtggcttgctctcggtttgg

SEQ ID NO: 194098 - DNA, 152 bp, Arabidopsis thaliana landsberg
caattacgggccgggccggcactgcccgaaattcaaacggcccagcccggcccgaaattcaaacaatacgagccttttcgggcttgggccgggcggcccgaatgtacacctataactgtaactcagacatcgcctccattagatcggctcgg

SEQ ID NO: 194099 - DNA, 509 bp, Arabidopsis thaliana landsberg
atggtatttaagagtggacagtcatggctgttgtcccctgaaaattacatgtttcgagtaagtaatgtagcccttaacctattatgaagttccatgttctctgtatagctagcactctatgcagtatttataagtctctctgtgtctggtgttggtttagccacaaatcagtagctgatgtgattactttttgatcaataaaagcattccaaggtgcatggtgcttactgtctcggtgtcttcccaaacggaaaagatcacacaactcttttaggaggtaaatagatatcattactttgtttgatttttctctttttatggctaccttcatttgttattatactgcatatcattttacttgccaacagattcatttgtaacaaatgatcttatactattatcaggaattgtggttcgtaatacacttgttgtgtatgatcgtgagaattcgaaggttggattctggagaaccaattgttcagagttatcggataggcttcatattgatg

SEQ ID NO: 194100 - DNA, 423 bp, Arabidopsis thaliana landsberg
atggcagaaccggagacaggctacccttgcagctttaatacagtaagtatataaatttgtaacgtcgcaatgtacagtatttgtgttagtcattatttaaatacggaaggagggatggtaaccacgacttatatacagtagagactgacattagcactgcttttcttggcacttcccgtccaggtgggctgttgcctctagtttgggttgctggctccatccctgtcacaggagttgattatcgccaagaggccagcacaccgatcaggcattcaggccttctattctatcatttcagctcgtgatttattgggccagtctctactctcgtatggtgacaaaggcccgtcagcctgcgtgcacctaacgcggccgctcgatatttccagatgtgctccggccgagtacagtttacaagaataa

SEQ ID NO: 194101 - DNA, 1242 bp, Arabidopsis thaliana landsberg
agcccgaaccgtttacatacgattatgaccggaactttttgttaactgattggtatcacaaaagtatgtcagagaaagccaccggtttagcatccatacccttcaagtgggtcggtgagccacaagtgagttcttttttccatcactcaaaagtcagattcttgtttgatcgatcaaattttatgtttatggatgattcttatttggatattatcagtcgcttatgatacaaggaagaggaagattcaactgctcaaacaacctaaccactcctccaagcttagtgtctggagtatgtaacgtctcaaacgctgattgttcgcgttttattcttacggtgattcccggaaagacatacaggcttcgaataggtagcttgacggctctctctgctctcagtttccaaatcgaggtacttagcttgagaatcaagccaatcattttcattgtcttctctgtttctttctttttcgtattctaatggaagatgggttaaattaaacaacagggacataatttgacagttgttgaagcagacggacactacgtagaaccattcacggtgaagaatctctttgtatactccggcgaaacttattccgtacttctcaaggcagatcaaaaccctcgacgaaactattggatcacctcaagcatagttagccgtccggcgacaactccaccggcaaccgctgtactcaactactacccgaaccacccacgacggcgtcctcccacgtcggaatcatccaatatcgtaccggaatggaacgacacgcgctcccgtcttgcacaaagcctagcaatcaaggcgcgtcgaggattcattcacgcgctgccggagaattctgacaaagtcattgtgcttctgaatacacaaaacgaagtcaacggatacagacgttggtcggtcaacaacgtttcctatcaccaccctaaaacgccgtacctaatcgcgttaaagcaaaacctcacaaacgcgtttgactggcgtttcacggcaccggagaactacgattctcgaaattacgacatattcgcgaaaccccttaacgctaacgcgacgacgagcgatggaatctacagattgagattcaattcaaccgtggacgtgattttacaaaacgcgaatacaatgaacgcaaacaacagtgaaacgcacccgtggcatttacacggtcatgatttttgggtgcttgggtacggagaaggaaagtttaatgagtcggaggatccgaaaag

SEQ ID NO: 194102 - DNA, 260 bp, Arabidopsis thaliana landsberg
atggaaatcatgtaaggccgagcccccaaaggtggtctttttactccttttgccggcgtttcgaaaccactcctctaccctaaacattcttactttccttccttttccacccccaccgccacctgttattaactagtagaagtaacgggccccacggtcgacatctcctgacatgtacccttggcttcgttacagctatatgcgcagatatacttcttgtcattgctgtcaccctgacaggttcccgtcctcagactcag

SEQ ID NO: 194103 - DNA, 295 bp, Arabidopsis thaliana landsberg
gatgcggatataatgtggcttcgagatccatttcctcggctatatcctgatggagattttcaaatggcatgtgatcgattcttcggtgatcctaatgactcagacaattgggtaaacggaggattcacttacgtgaaatcaaaccacagaagcatcgagttctacaaattttggtacaattctcgtcttgattatccgaagatgcatgaccaagatgtgttcaaccaaatcaaacacaaggctttagtctcagagattggaatccaaatgagattctttgatacagtttactttg

SEQ ID NO: 194104 - DNA, 79 bp, Arabidopsis thaliana landsberg
gccttttaatggaagcaaaggctttggcaagaatcggatagataccggcggcaactgctgccacggcgagccaacgtaa

SEQ ID NO: 194105 - DNA, 966 bp, Arabidopsis thaliana landsberg
atggcgaaacctggttttaatcgaaacaaaaagatggtgaaacatgatgatcttattgtttcactgatgagtcgtatttcagaggatacgttgctagaaattgtcggacagagggtagagaacatgtatgccaaccacacagaatctcaaacgaggagtcctggaaaacaccaaactgttgatcacttgatcctaatatctctggggatgcagggctaagaaagaagagaaagccttgtcaccgatcatcttcttctcccacgaagacaacaacatgtacgcgtgcgctggaacaacaaagatcaatcacttccgtggaaccagtactacaaaaccctaatccaggtttagaaccgtctccttcttcttatgttactcgtcggcagggtccaaagaaaaacgtcccattaatgtggaaaagaaaagtcacaagaaacgcaaaatcattagtcctttaggggaggaacccattcaaacaactccacaggagtggctcttgaacgtcatgaggagagaagagaacggttacaatccgaagttgatctcaacgaggcaactgtataagaccgatctcaaaaaaactgaagcacgtctctcagttccttttaagcaggtgaaaactccggactttttgacagaggacgagacaagaatcatacatgagatgccatgaagattcgtgacaatggtgtgcctgtgaatttcgtggatcctgagctgaataagcatgtgcttgaattgaggaagtggaaaataaaaggaaactggatttatgtctttgttaaaggttggaaaaacgtgcttgatgcttgtaagacgttgtttaaggaagacgacgtctatcctctcgggacttcccgatctggaacaggcaaactctgttttgctctcacccctaaaaactctggccgtggaaactctcttcctggcggtgatggcgcttctacttccggtgaatctggtcag

SEQ ID NO: 194106 - DNA, 494 bp, Arabidopsis thaliana landsberg
gaaggtccctatcgaatcaccgaggtggtacgttgcggcgtctataagctcgtaaaagttatcaacggagtacgtgagttacggccttggaatgccatgcatctcaagaaataccacgaataggtactcaaaaacaatcaaactacgataaggcttgatcccttggcaggatacgtaggcagctcccccaagagcagaaccaccaattcaatcaaatcacaaaagggcttaatcccttaaccaggtatgcaggcagtcacctccgcaaacgcaattaccacctcaacccttccatctgaaaggcgaaacttcaataagggaaatagatatcgcatcccccatcaacgaagatcagctgctcacctgacagtttaacctttcttcggtatcgaccaggtccctgctcaatgaccaaacgccagatcgtcgcttgctttacctccttttcgtttggtcatcgagcagggacctgctcgataccgaagggagattga

SEQ ID NO: 194107 - DNA, 112 bp, Arabidopsis thaliana landsberg
cgaaggggaccttgaagtcgagcgccatcaaagcaaaatccagatgccacttggacgaaggagacacaaagctgttcttgtctaggatgcaagacgttttagatacggacaa

SEQ ID NO: 194108 - DNA, 291 bp, Arabidopsis thaliana landsberg
atggacgttgatgagcggagcagctactgtatcgagggtatggtcggctgaaatggggaagggtgtacgtctgttctctactgaaccagagaacgatgttccaacttcaggaatcagtttgccttatgccacaagatcatagctacacagaattcaattttttcaaacccacgtttagtgaatcaaatttatagaacacacgaacacactttaacccagatttcttcgaaaaccattaaaacccaatcctatgaatcagattccaaagatagagaatctatcaatctatga

SEQ ID NO: 194109 - DNA, 152 bp, Arabidopsis thaliana landsberg
gtcaggtgcgggggcgggccgaacggctggagctgccggagggcgcgccggtttccgcgctgtcgagccgagcacagcgcgaagacgtacgcacaggtcccggcggaggcgccattcacgaacatgcccactgtgaccagtgccgtgactag

SEQ ID NO: 194110 - DNA, 120 bp, Arabidopsis thaliana landsberg
cctcatccactcgatgccgattatgttcttattcatcgatcaggctcgttgttattgtacaaacaacaaagacgtgtctcagcgtcccctgctttgtctacattgtcctcccataaatga

SEQ ID NO: 194111 - DNA, 122 bp, Arabidopsis thaliana landsberg
gtatggcgcaagccaactgaaactgcaccttctgatgccgcagggtttggctctcacccgctaggtgctatgtttgccgttgggctacgcaccgtgtttgatgtacagctcttgcggtgccc

SEQ ID NO: 194112 - DNA, 403 bp, Arabidopsis thaliana landsberg
actcgaagacgggatctggctgatatacttttgaacagaggagttaatctagacccattaagcaagtggtcaaaagtaagtagtatttgcagattgtcttccattttatttgcgaaaacatttttgtggaccatctttagttgatcctggcataatatttgtaggttggacttatcgtttatgattcacaagttccgattggtgcaactcctgaatatttggcaggattctatatggtacttgattttctgattttttttgtacttttcggctcacactttatgggttttcttattgtttacttaagtatgttcttggtacattttcagttgcaaagtgctagttcgttcttgccagtgatggcccttgctcctcgagaaaaagaacgagttgtggacatggc

SEQ ID NO: 194113 - DNA, 466 bp, Arabidopsis thaliana landsberg
atgcgtgcgcacgggtgagaaatcagccgtatttcagcctagtggaaagaagacactcagtgctagcaggagtactttctcggatacgatccctttttataggtttgctgccctgcgacacgtggcagaagaggactcaaggacacatgccagatctttgggtcggtatttcttccttaagatctcaaccaaccaccctttggtggttttccacgaccgaaccataggtcatgaggcattcaaaatttgacatgcatcgaggtcaatctttgcaccttagatgtgatgagactatttattttcaaagcgacccgttgaacccaaagcccagagcgaacgaccttgacaaaggtcccataaagacccttttttgggggtcttgtttcaaggtcttattccttccataggaggacaccttggttccaagatctctatgtctttaatgccccttgggacgttgaaagga

SEQ ID NO: 194114 - DNA, 773 bp, Arabidopsis thaliana landsberg
tgttggagagagcggtcatccgagaatccgtgagatctgttcgacgctagacaatctagtaatcaaattcagaaagtttggatataaaccaagcgtagaacacgagctgcacgatgtggagataggaaagaaagaggagcttttgatgcagcatagtgagaagctggcattggtttttgggttaatgtgtttaccagagagttctccagtgaggattatgaagaatctgaggatttgtgtggattgccatgagttcatgaaggctgcatcaatggctacaagaagatttatcattgttagagatgttaataggtttcaccatttcagtgatggtcattgttcttgtggcgatttttggtgacaaagacaaactctgttttattattgatctcacagataaataaattattttttccaacgaatgttttaaattatgattgcgtcaatttgttgggcttattggccaataggcaaaacgaagagcataacaaagcagctctcagagaggcaaaggtaaaacttttcaaggctttgctgatgattttcacttaattactacctagttaattcgtagacgctttctgatctttatgatatagatcaaagagcttaaggctctcataggtcagctttctggaaggagttcactgtattgttcagatgcatgtctgaagagatatctggaagcgaggaattggaacgtaggcaaagccaagaagatgttcgaggagacgctgaaatggagatcgagttttaaacccgaggaaatctga

SEQ ID NO: 194115 - DNA, 285 bp, Arabidopsis thaliana landsberg
aggaatattcaattccaaccgaatgagaacaccaccatcaaatacagatttgaaagattgaggaacttctgtaccaagtgtggttctcttaagcatgatgttaaggaatgtgcattggcgtttgaggaggctgaaccggcaaatgtgaatgatggaaatgacgatgaccaccatgagaataaccctgatgaacaagagatgacaggagatgagtcgctgcctagtgttgatttcaccacattgattccggatctacagagtcatgccgctacaaacattaaataa

SEQ ID NO: 194116 - DNA, 388 bp, Arabidopsis thaliana landsberg
atggtgtggtgcctcgatgtggggaagcgccaaaccggggcaggaattggggacacgaacgtcgacgcgcggaagcaccgtccgcgaacgggaagggagaggaacctgggatttgggcacgccatgggtcgagggctcggaagcgccatccgcgaataggaagggaggggaaccggggatttggggacgcgaacgtcaacgcgcggaagcgtcatccgcgaacgggaagggagaggaaccgggagcggtatttggggatgccatgggtcgagggcgcgcacgtggtttgtgccggcgaggagccggggcgagatctgcgcgtcgcggggatttcggggaggagaatagagtcgggcatgctgtgtgcggtggagacggtggaggggtg

SEQ ID NO: 194117 - DNA, 156 bp, Arabidopsis thaliana landsberg
gaaggggaggaaaggagaaacctccaggcggttcaagaagacgaccatggtcaacggccaagaacatcatcaagttagaccccactatcattacaaccactggaactcgaaaacggacacgaatcaatcccgagacagaaagagaatctataccag

SEQ ID NO: 194118 - DNA, 291 bp, Arabidopsis thaliana landsberg
atggaatacccttacaatgcaattattggtcgtggtaccctcaatgccttcgaagcaatccttcatcctgcctatctttgcatgaagataccttcggatcagggacccattgctatccatggaagtcaggaagctgcaagaagggccgaaggcaattggactgactcaaaagcaatccataacatagatggagctgaagcttgtgaacagtacaaattcagaagggagaaagcagcttcagcagatcagccgaagcctatgctcttatgtgaggacatagcagagcagaag

SEQ ID NO: 194119 - DNA, 237 bp, Arabidopsis thaliana landsberg
gaccctctcgtttttggcatacgtgaacgtgtctcacaaccaactcattggtgaaataccacaaggaacacaaataactgggcaacctaaatcgtcatttgaaggaaatgcagggctttgtggttttcctcttcaagaaagttgctttgggactaacgcaccagcacaacatcctaaagaagaagaagaagaggaagaagatgagcaagtgttaaactggaaagcagtggcaatagg

SEQ ID NO: 194120 - DNA, 159 bp, Arabidopsis thaliana landsberg
atggaagtaagcaagagaatggagatgttagagaggaggtcttcgatagagacagagccaatgacattgcatctcgatcaattagaaaatgctcgagaagaagcattgtatgtgatgaaaacaaaaacaatggaggaagctatggatattttcacaaag

SEQ ID NO: 194121 - DNA, 352 bp, Arabidopsis thaliana landsberg
atggacggagaagaagtaagcactattgtcagggtacttgcggacaagagttcaggggtgtttctgtgggcacaactcgcaaccaagttcctcctcgaaaacctagaacccgactcggattttctcatcttgaaagaccgcgcggacgcccttccctacattctcgacgacctgctcgcccacatactcagcaaactcgccccagaagacattgaggtaatcaacaaactgcacaaccttctctcacaccaaaacacatgtcctgctatccttccattctcatttgcctatacagccgaaacaccagccacattagccgctgatgtacggcctttgacagcggtcgaaataa

SEQ ID NO: 194122 - DNA, 78 bp, Arabidopsis thaliana landsberg
gtcagtgagaaaaaaactattacgtcctttttccaactgaatatcattgttggtcagattcgaacccaaatactttga

SEQ ID NO: 194123 - DNA, 574 bp, Arabidopsis thaliana landsberg
atgatctcggcttgtgtttacgggggaagtaaggaagaaggacgttgtattcatgggttggtgatgaaatttggtgtacttgaggaagttaaagttgtgaatgcttttatcaattggtatggaaagactggagatttgacttcatcctgcaaattgtttgaggatttgagtataaagaatttggtttcttggaatacgatgattgtgattcacttgcagaacggtttagctgaaaaaggtctggcttactttaacatgagcagaagggttgggcatgagcctgatcaagccacttttctggctgttctccgtagctgtgaagacatgggtgtagtgagattggcgcaaggaattcatgggctaatcatgtttggtgggttcagtggaaacaagtgtataacgacagcgttattagacttgtattcgaaacttgggaggttggaggattcgtctacggtttttcatgagattacttctccagatagtatggcgtggactgcaatgcttgctgcttatgccactcatgggtttggaagagatgcaatcaagcattttgagctcatggataaatatg

SEQ ID NO: 194124 - DNA, 228 bp, Arabidopsis thaliana landsberg
gttgcgcattactccgtccatatcatactctccggtgctcttgcgttcatgcggaatggagagcgtgcggtacgcaatatcatgcgcaccaacaagacactggcacgctccgcagagcgcgagcgcgcgtcacgcaccaaactggaagagatcgcgctccacaagatggaaaacgctctctctgagaaggaacgcgcgatccataaggagcgcgcgctcaacggataa

SEQ ID NO: 194125 - DNA, 124 bp, Arabidopsis thaliana landsberg
atgagctcagaaagcaaacgaaagaccgcggatctaaaggttacatacctgcatattgcacttgacgagatcgagaggagtcacggtcatgtgagtaagaccacagctgagaattccacccaag

SEQ ID NO: 194126 - DNA, 232 bp, Arabidopsis thaliana landsberg
atgggggcggctttgatgactggccttgccggttgcgattcgaacggcacgactcgcgttgcccgcgtggggccggtggggtccggcaggaccggccggagcgcaaggcgaacagggccatccgggtgcggatggggcgcggggaccggcaggcccggcaggcccggcgggaccggcaggacaagctggcgcctcgggcaacgacggcgcgaatggcggagacggcagcgac

SEQ ID NO: 194127 - DNA, 220 bp, Arabidopsis thaliana landsberg
aacggatcacccggaaaccgatcgatcaccgattaaatcaagaccgtttgttattgatccactgtggtaaacgatatggccatgatctaatccggagcgtgccacaaaatccgacggcacacgtctcccgtcgcgccccctctcactcgtcggacttgggcgcgacgcccgacccaacggcggtgttcccacgggagatcgtccaaccggcgctacgaag

SEQ ID NO: 194128 - DNA, 338 bp, Arabidopsis thaliana landsberg
atgcttgatagcctgcctaagaatgatcccatcacttcagaagaaatttctgaagctgctgttgacaacaagcaaagtagagttattatagacatatttagatattcaaccatacgatcagagtgttaataagaagtcattatagacatatttagatattcagccgctgattcgaatgccgaggaagaactttaggcctctgaaacctatcagtaacgaaatctttccatcggagaagttatttgttgcaactactatttcacttagtggaccctgacccggcccaattctccaaaccagaacaaagctgctgcaatggactggacctaaacgaataa

SEQ ID NO: 194129 - DNA, 754 bp, Arabidopsis thaliana landsberg
cttgtgtaacgtgaaggctacatgccagcagaatttgctatcccatgccaatggcagaaaacaccgagaaaatgtcgaattgtttgatgctacacaacaacaacaattagaaaaaactacagtggataaaaaggatacaacggtcaatgcttcggatggtaattccgaacaaaagaaagtagatttgcttgtctcctcaggtgttgcaaatggatattcacaggctcacaaaaagagaaagctagagacctgcgatgaaacatggaaaagggaggtagttcaggccgaagaagcaaaaggagggggtgagcaaaagagtgaatcaaagaaagccaaaaagcaagacaaagagaagaagagaaagaaggacaagaagcagactaagtcagactctgatttcgagcatgacaaggaagatatcaagcagctgttggtagcttactcgaaggaagagcttgttaacctcatatacaagactgccgagaagggttctcgattgatctctgccatccttgagtcggctgaccgtgacatcgctcagcgcaatatatttgtgcgtggctttggatgggacacaacgcaagagaacctcaagacggcttttgagtcttatggggagatagaggagtgctcggtagtcatggacaaggacacgggaagaggtaaaggttacgggtttgtgatgttcaagacacggaagggagcgagagaggcattgaaaagtccggagaagaggatgtacaaccgcatcgtg

SEQ ID NO: 194130 - DNA, 176 bp, Arabidopsis thaliana landsberg
atctcctaagcagtctccaaaggaaccgagtgagagcgtctcttctaaaacagaactcgaaaagactaatgtaatttccccaaaacctgatgctggtgaccaactcgacggtgatgtctccaaacctgaaaatacatctttggttgatagcattaaagaggatcgaatatgggatg

SEQ ID NO: 194131 - DNA, 247 bp, Arabidopsis thaliana landsberg
atggcctcgctcccctcgctcccctccgccgcccgtacgcgccggacgtaggaattcatagtctatagggcgcccaccctgtcgctcgcttccggcaattgctgtaggcagccgctttataccgcaccgcgtcagactgttgtgtacgaagtatctagacttcggccgccacccgctgccacacgggcccccgctagcgctcggctggcgcagtcagctccctgcagaaaccacgtccggacattga

SEQ ID NO: 194132 - DNA, 299 bp, Arabidopsis thaliana landsberg
accaagacttgcttctctcgacatattccgcgtgctcactgtcgccgtacgtatcgccatctactctctctctatacttgtgcgagttttcgagctcttaaagctctttaaattactcataatagtagatgattctcgtcgaagacgctggaggagactggccaatgattgctcatgctccgtgggacggttgctatttggcagagttcggaacgcctttattagtgttcgtcgtgggtgtctccactgctctatgcttggaggtcaattacgcactttacatctctcagaaatgccat

SEQ ID NO: 194133 - DNA, 309 bp, Arabidopsis thaliana landsberg
atggtatgttccatgcgaccaaaggaggataaatttactttttcggccgtttttgaattggatgaaactggaaaattgtctaacgaatggttcggtaaagccgtgattcattccgaccaccggtttgcgtacgaagatgcgcaggaaattttggaaggagcagaaggtccctacaaggaagaattgcatttattggacaaaatcgcaaaaatttatcgaaaagagcggtttaaacaaggtgctttgatgatcaactcggaagagatccgtttcaaactggatgagaataaggacccaattgacgtagtc

SEQ ID NO: 194134 - DNA, 186 bp, Arabidopsis thaliana landsberg
atggaaaaagatgaagaggccagaagcgacatgctccaaccaacgtgcattggagcaacgtactccataccacatagcaggaagccaatgcccgatggaccaactcatacgtgttaccgcgatggaagatggataataagtggtcgagccatgcatccaaagatttggggtcgaaatacaaggaaa

SEQ ID NO: 194135 - DNA, 180 bp, Arabidopsis thaliana landsberg
atgaattataaaccgattgcaacaaaagaatcaattcttaagtattataaagtaaacttcaatgaaccaaaacccaaccggaaaacacaagtcacaaacttcgatatatatacctcaacaagtctgaataaactggttcaggccaatttgcacaatcaagcccaagcttttgaaaagctg

SEQ ID NO: 194136 - DNA, 81 bp, Arabidopsis thaliana landsberg
agcttacgtctaagactgatcaagaaaagtttagcatcgaatgatgatgacaagaagatcaagagtgttaataagtggtga

SEQ ID NO: 194137 - DNA, 131 bp, Arabidopsis thaliana landsberg
taactagagtcccaatggtacgaagttcaggagcagataaaactggggaagggcgtctgaaaaaagaaaaaactgtcagccttcagtatccaaacatgtcagatgtcacaaaggattttgagaaatactaa

SEQ ID NO: 194138 - DNA, 236 bp, Arabidopsis thaliana landsberg
acacatacgtggaacacatacaatcatcttgaatggctctaaactaacaacaattcagacatcacaatctacaggtaaaagaacacatatttcaaaatcggcagaatcaaaatcaacaaccaaagacgttttcattacgagaattgtagagaaaaagacgtaccccactggcgataacgacaccggtaacaacggggacgagagcgccataagtgacccaagcttctctcttaaag

SEQ ID NO: 194139 - DNA, 77 bp, Arabidopsis thaliana landsberg
atgggcggtctgcagagtctaatgaagcagatgggttccggcaaggacatgatgggaatgttcggtggcggagacaa

SEQ ID NO: 194140 - DNA, 34 bp, Arabidopsis thaliana landsberg
atgcgtgtggttccgaagcccacggacacggttt

SEQ ID NO: 194141 - DNA, 110 bp, Arabidopsis thaliana landsberg
atgcgagggggtcggatgcggaacggagcaaaccggaccgggaggggagcaggggagcggaccaagggggccaaaaacggaagccaagcagctatggaggaggcaacaga

SEQ ID NO: 194142 - DNA, 118 bp, Arabidopsis thaliana landsberg
gaaaatcaagcaattctgcgataaatcatttgtcgctcccacgagcaaattagaagacactcaaagaacaagatataagacaccaacaaacaagtgggaaattgacaaaacattctag

SEQ ID NO: 194143 - DNA, 1211 bp, Arabidopsis thaliana landsberg
attctcaaatctagatcgattactgttcgcgttcgtgttactctcttgattccagattctgttcttatcttcgatggagtcgttgacattgaagaatgggaaaccgatgactccggtgaaggatcggagcaagtttcagtccaaggttcaagatacttccagatcgttggagaattcgaaccctaacatttcacaagcgagtccggctaaatcaccgctcatgaaatctgcgaagaaatcggcgcagaagaatccgagtccgaaccctaaacctacccaggcggttttctctccccggaatcggatcagggagaggaagtttgttgtggtggcgaagaagaattcgaggaaagggaagaaggatccagcggttacagaatccaaggttgctgagatagattgtaaatgcggagagaggaagaaggggaacatgaagtgtgtttgtgttgcatatgaaactctgcgtgcttctcaagaggagttcttcaaaaatcgaattgaatcagcggaggataaggaagctttggaggaatgttgtaatctcggaaatgaagatgaattagaaggaaaagaatctggagaaccggagaaaataggcgtttccacaatgaagagatcaagagctaaggtggtggaagaagcacggcaaagtgtgcctgtatctggtaaagtgatgaatcttgtagaagcatatgagaaactcacttgctttagtaattcaaagactgccaacaagatagaagagaatcaaaccgaagaggatacgaagagacctgtaaaattggaattcttggagggtgagaaagagaaaaacccgtggagttcttcgttttgtccatctgaaatggtcttaacagctaagaatctgggtttagaccccaatgcttcagtttcttcgtcctgggacagcacccgtggcaggttagtttgttgttgactaagagatctcactgaaattatgaactcgtcttgttctgaatagtttgatcttgtgatgtttcagtgttttgagtggaagttcaaatgctggcaggagaagtagaagaaatgtaagtgtcctggatgcagcatccgaattttcttagctgtttaatggttgtcagtcttgcttagtatgtcagaatagtttaatatcaatttgatatttctgtttatggcagagcatggactcatcgactacaatgggaagtagaagatcaaagaagaagcag

SEQ ID NO: 194144 - DNA, 245 bp, Arabidopsis thaliana landsberg
gtagctcggtgaaggagtttgtggaagcgtgcaaaaaggcgaccggcgttgatataaaagtcgattacttggaaagacgggcaggagattacgcagaggtttacagcgatccaagaaaaatcaaagaagagctgaattggacagctaagcacaccaatcttcaagaaagtttaaagatggcatggagatggcaaaagcttcatcgcagtggctatggatcttcttccttggtttctgcatactga

SEQ ID NO: 194145 - DNA, 499 bp, Arabidopsis thaliana landsberg
atgccgtcggtgggaatgagacgaaccactagggttttcggggtggttaaagccgcagacggagcccgtgtcctccgttcgggtcgccggatctggcctaacgttggcgagccaaaggtacggcgagctcatgacgtggtggatcgagattgtgatagcgttttgaagaatcagaacaaatccaaaggcaataaagtctcctccggtaaaagtaacagccagccttgtagcccgaaacaagtttctagtgagaaagaagacaaagtagatgactttccggtcacaaaacggaggaaagtgagaaatgaaggtgtaggggatgaaaagactgtggataagatgtttgggattgtatatagtaggaaaaggaagagactttgtgaaccatcatcaagtgatagatcagaagagccactacgaagcctgaagttttatcgcaggcgaagaaaactctcacaacgggtttcttcagtgcttactcttacagtagattggtcat

SEQ ID NO: 194146 - DNA, 108 bp, Arabidopsis thaliana landsberg
actgaattggtcggtttttcgggtttcggttttcgggtttggtccacagatcgtatcaatttggttctcgggttcggattcggtttttataacgtgttacccgaatag

SEQ ID NO: 194147 - DNA, 300 bp, Arabidopsis thaliana landsberg
atggcgaaccaacttcttttatctctgaccatcaatgtagaacacgccttcctcttaatatgccttaggctcgatagtctctgcttctgcaaagaagtgaacttgcttcttccctgtaagtaggctatgctctgaatcaagcttagcatttacctcaacaatttggtttctcgaaatagctccttctatcttcttcctcttgaagtttggattctacgtattgttgctacatgcaagattctctatcaaagttatagcatctgcaagatacgtggtgttgaagttaccattgttcaatga

SEQ ID NO: 194148 - DNA, 409 bp, Arabidopsis thaliana landsberg
atggccgaggcgccggcgagcgagctgatcggcaatgtcagccgaggtgacggccactccggcgaccatgccctcgaccatggccaccaacgcgcgaccgtgcgattccccggcagttatccaacgcaacacgtgtcccatcttcccatgccggtcaggcccgccagggcttggaggagtttacggttgcccacacgggctgctcagcgcagcgacaagcgggattcgatctcggctcgagacccgccagccgggttcaggaaccgtttttgaggatcaggtacgtgacggcgtcacggccgttgctcggtgaggtcaccgcattgagctgactaccggcattgccgaccaccccgtcgagaatctggtcgaagtcctccgcggaggtctccgggtcgatcagcactaa

SEQ ID NO: 194149 - DNA, 279 bp, Arabidopsis thaliana landsberg
gtacaaactttgaacaattaactaaagagagtaaagagacctgttcgacgggagaaggattggtctgcctagcggaagcaatgaaagatttaccgccaaatttaccggacatattgttgttcatccacaaagaagcgccgccaaaaccaccgagaaccaaccggcgacgtgaagaagcacgaatccaactgtggaaaggtttcgaagcagttgtcggaagattcagagccgaggaagctcggaggaaaggagagtttccggtggaggagaaaatcggag

SEQ ID NO: 194150 - DNA, 463 bp, Arabidopsis thaliana landsberg
atggaagcgaaacgaaacctgttgagggacaccaagaggagaagcagtaatgtaagagagagtgaaatcgtaagagacgtaaggatcaccagcgaaagagaagccgaagataagagtgaaagagaagacgaaagcgaagaaaaaatcagtagccgccatctgaataatctctgtgatttttgaggtttatttcgctttcttcgttgacgatcttcgggttatagaaacgacattatcggagcaacaaatcgaaaacgatgaagaagaagaagaagatgaagagtgtgtaaagtgtgtgtggggggttttgaaacttctctgacaaagaggttgaagaagaaacaaaaatgaggaatttatattctctatttatttattaattttagtgacacagattttgctgttgatactaatccctaaacgcgttagtattactggttaccgaattaaccggttcgtctaa

SEQ ID NO: 194151 - DNA, 322 bp, Arabidopsis thaliana landsberg
atgacgatcaaccagataacctcgcttgtgaaagctgagaaagcggcggagaaagaaagcgttttggtgacgattgaagcggtgagaccaatgaaagcccaagctccgactgggagaggactaagaacgagaccagcgattgttgagaggaagattgagagtaattgccagccttgtggtgtgactccttctggtacaggaacagcgaatcggaggattagaccgacggagattgagagaatcagagggattagtttcgctccttgaggagacggagacggagacggagatgggggaggaggaggaggagcgttgtcttgcg

SEQ ID NO: 194152 - DNA, 88 bp, Arabidopsis thaliana landsberg
atggtagcatggtccttgctgtctgccgccaccaaccatgttgtctgccggtacgaagagcgtgccgatactagcctgggctattcag

SEQ ID NO: 194153 - DNA, 247 bp, Arabidopsis thaliana landsberg
gactgccaaggggatgccaagttcctttttcgggcatcactcgtgtattgccatgcaagatggggccagcgacccggatcgtcaagcgagaagctgtgcggccaggggatcaggcctggctgcccccgtgacgcccggacaggcgctggcgctcggccagcacattgtcctatgcattgcgggacagtcgtcgggaaaacatataggcttgggactggtcgcactgctggtcgcgcaaaaagttcag

SEQ ID NO: 194154 - DNA, 98 bp, Arabidopsis thaliana landsberg
atgaagatgaagactataacgaagaagcgaacgatgaaagtaatgataacaacggccaaaaaaattgataattatgatgacaagaaggaatatgaaaa

SEQ ID NO: 194155 - DNA, 205 bp, Arabidopsis thaliana landsberg
atgaccggcgtcttcgtgctcgcaccgctcgctttgatcgacaggcgcccgggcgtcaccgtggagggcgtgctcagaaactggggcctcgtctttatcggcaatttcggcggcgcgctcaccgtcgccttcatgatggccttcgtcacgaccttcggcttcacgcaggcgccggacaaagtcggcgccgtcatcggcaatatcg

SEQ ID NO: 194156 - DNA, 200 bp, Arabidopsis thaliana landsberg
gaaacctggcaggtgttttcagtgcatcatctgcagggctggtattcaacaatacttctaccggtgagatcaatgtggctgcaagtactccgggcacatacacgatcacatttactgtatcgggagcctgcgtgtacagttcatcatcgaatattaccattactaccacacctgttgccaacttctcttatgtaagcccg

SEQ ID NO: 194157 - DNA, 104 bp, Arabidopsis thaliana landsberg
ccacctttaaatgccgtcgtttttatcttttaaaaagaaatgatgactataggattcgaaccgttcaccttcaagtgctccctgtgcttgtcaataccaactaa

SEQ ID NO: 194158 - DNA, 231 bp, Arabidopsis thaliana landsberg
cttgatcacaccagctacatcatcattatatgcaacatgcaacataagtacgcaaatcgattacagaaaactaaaagcgagcaaattgagacagaacaaattacagaatccaggaattggaccgccgatttgcgagtgtcggacgtggagctgaaatcgacgacggcgagaatcgctcgagccacattacttgccgtggagttgctatcttccattacttgcgacgaataa

SEQ ID NO: 194159 - DNA, 243 bp, Arabidopsis thaliana landsberg
atgcccaacctttacgacaacaagggtaggccccagacttgctcactttgttaccgcccctctgactatcccacggagaagaagtctgtccccgtcaatatacccgctgggggcggtggcaagggcatagagaagagggcgaaaggtgggaatgggaaggataaggatacgggaggcgaatctggatatgaaggggacgacgagaagaaaaagaagaacaagaaggagagccgcgacaggatg

SEQ ID NO: 194160 - DNA, 100 bp, Arabidopsis thaliana landsberg
tttttctttggcactgagtgatgtaatgattgttccagttaaatctattggatataatcttcttcgagaaagaaatggcgagaaagtttttccgaagaac

SEQ ID NO: 194161 - DNA, 162 bp, Arabidopsis thaliana landsberg
tcagagctgggatgatgaatgtgaaggttcgggtgattccatagtaaagcacaggcctctctggtcgtcttatagttcaaaacttcagaagggaaagaaaaagaaggccgttaagaaaaaaggcgatctatcaagactttacggaacaagagttattccagt

SEQ ID NO: 194162 - DNA, 130 bp, Arabidopsis thaliana landsberg
tattattgtcgcgcagcgttacagtaataaagctattatcgcgtatggttacttctttagttatataaccggtgtagcttattaccaataccgcacccggatcggcgtctatcgaaaagttgcctgcctg

SEQ ID NO: 194163 - DNA, 479 bp, Arabidopsis thaliana landsberg
atgggtgaggtaggtcctcaagtcgctgctccgatttcagttcatcatcctatggggaaaaaacgcgacctttatgtacaaccacactggcttgtgtcatctcagttacccaaggatgattggcagatgaacaggtggaagtgggatggtcagagatttgaagctatagaactacaaggagagtctctccagctaagtaacaaaaaaggtcttgatttgaatctaccttgtggttttaacgatgttgaaggcacgccggtggatttaaccagaccgagtaagaaggttaggtcgggatctccgggaagtggcggcggaggaggaggaaactatccgaagtgtcaggttgataattgtaaggaagatttatcaattgctaaggattatcatagaagacataaagtttgtgaggttcatagcaaagctactaaagctcttgttgggaaacagatgcagaggttttgccaacagtgtagcag

SEQ ID NO: 194164 - DNA, 433 bp, Arabidopsis thaliana landsberg
  unsure (1)..(433): unsure at all n locations
accattgccgatgaagacgtagatcatccagactgggtggagatctacaatggcgggtccacttccattaatctttcgcatgacaccctgaccgatgacccaggtaacccgaccaaatggagctnnnnnnnnnnnnnnnnnnnnnnnnntgaattcaaggtggttttctgcagtggcaaaaaccgtcaccagacccagccttttactacagtattgaacaccgggactttnnnnnnnnnnnnnnnnnnnnnnnnnnnnnnnnnnnnnactcccttttactgggacggtgtgtccaacctcgtggtcaatacctgctcattcaattccgttggttatacggtcaattctgttttcaaccaatctgccacaacttttcattcaaccgttgctgcctggcaggacggaagcccggcctcgtgctcgttcgtgaatg

SEQ ID NO: 194165 - DNA, 1006 bp, Arabidopsis thaliana landsberg
gttaatggggaaggttgcttctgacaaatgccataaatgggttttcaaggaacaaactgaatctgaatctaatgcctctagttactggcaaagctcattcgatgctgtaagtttgtttataatataatgaagcatttacgtataataagattttaatctgcaaatttgtaaaacggctgagatctatctctaaaaaaaaatgcagattccttcagagtggaatgatcagttcgaatctgggattcaggtaaaataaagaacactaatcatatatgagaatgttcttgactttcttgtttctcaagtcacctttgtaatcttttcttattgtacctacagaccatagctgttattcaagccggacatggccttttacaacttggttcttgcaagattgtaagtcttttttattttggttcatggttaaaagattgtaagtcttctcttacttgggatctttgcggttatgttctctaaacttactcagatacctgaagatctgcactttgttcttcggatgaggcacacgtttgaatcacttggctaccaatccggattttacctctctcagctcttctcctcaaaccgaaccacttcgtcttcaaacacaccgctcatggcctcgaaccaccctctactacctacacagactcagccattgcaacccactcttccccactacaactggagtggtacgagccaacgaccaatgatgcctcaaacctctttgcctacctaccagcctcacatgactatgcctttcccagtaatgccacactcaaacaaagaacaagaccctgacgtgaaatggcccacgggcctatctttcttcaatgcgttgactaacaatgtcaacgctaagcttctgtttgattcagaggggttaggtgacaaaacagaccaccagaaccagagccaggaacagagcaactctgagagtcaagcgaatccgagcgagttcttgagccttgatagtcaccaccgaaacatgagtttcttagagtga

SEQ ID NO: 194166 - DNA, 268 bp, Arabidopsis thaliana landsberg
atggcctcacccatggtcgcctccccgatccgggcgacatccccaccaccgcgccctcgccgaccttcccgccgcagcgcctcacgtcatcgctgcccgtcgccaacacgtccaggtcgtcctccccgcttgactatgcccgaccccagtctcgcccgtgttcaccaacatggcctcactcacggttacctccccgatgcgagtgagccccatcgacaaccccaccgccacgccctcactggcctccctgccgcgacgccttgtgtga

SEQ ID NO: 194167 - DNA, 317 bp, Arabidopsis thaliana landsberg
gcctcctcttcgcagtagctgagctcaacggtttcagcttcagttcaacccacgtaaagttcggtttcacagccatagttttagctcgcgctcagcccgtgaacgcttggctaagacctgcgaaacctgctcaaggagaattaatctcttcgaagcggttaatctgggagtattctcattcgattgtcggtcaatcagctgttgtagttggagttgtggcgcttttcacgggaatgaaacatctgggagaaaggaatggaactgagaacgtggacgggcttaacctggcccttcggttatgggtcttcctctgcggg

SEQ ID NO: 194168 - DNA, 243 bp, Arabidopsis thaliana landsberg
tgtttgttatcatccctggagtttgtagagataaaaatcagcagattcggcataatctctcttggaattcgaatagcaaggttctttgtagagaactcagtagttctcaagaaacttgttgtgcattcgagccgtcccatgcgtaagaaaagtttggttgccttcgagaatctccttgcgttaccgaggcgatctagcatgtgtcaaatcatatctgttgttgacggttataaagacttttag

SEQ ID NO: 194169 - DNA, 131 bp, Arabidopsis thaliana landsberg
caggttcaccttccttaggttttgaaaacaatcgatcttcgagatcaccaagtgtatatactccttcactcgcccaaaagtatggttcttttacacaagatctttcccctttcgtcgaagttccctattaa

SEQ ID NO: 194170 - DNA, 1098 bp, Arabidopsis thaliana landsberg
atgattgatgaagcagcggttcatagaaatattggctatcattcaaaatgcgagaaaattggtttgacacactcgtgttttgctgatgaccttatggtgtttgttgatggccatcagtggtcaattgagggtgtcattaacgtcttcaaagagtttgcaggtcgatcagggttgcaaatcagtctagaaaagtctactatttatcttgcaggagtttctgcttcggatcgagtccaaactctctctagtttcccatttgccaatggtcaattgccggttagatatttggggcttccattactaacaaagcagatgactactgcagactattctcctcttatagaagcggtgaaaacaaaaatcagctcctggacggccaggtctctatcttatgcgggaaggctagcgcttctcaactccgtcatcgtcagtattgcgaatttttggatgtcagcgtatcgtctacctgcaggttgtataagagagattgagaaactctgctctgctttcttgtggtctggccctgttctcaaccccaagaaagctaagatagcatggtcatcaatctgtcaaccgaagaaagagggtgggctgggaattaaatcacttgctgaagcaaacaaggtcagttgtttaaagctgatatggagacttctctctacgcagccatcactatgggtgacttggattcggacttttattattcggaaaggaacgttttggtctgcaaatgaaagatccagtttgggttcttggatgtggaaaaagttactaaaatacagagagctggctaaatcaatgcataaggtggaagtgaggaacggaagctccacttctttctggtacgatcactggtcacatctgggccggctcttggacataacgggtactcgtcgggtcatagacttgggaataccactcgaaacaaatctggaaactgtcttgcgaacccatcaacaccgtcaacatcgggctgccatctacaatagaataaacgcagaaatccaacggttacaacaacaagaacgagaagcgggccctgatatctcactttggcgttccttgaaaaatgatttcaacaagcggttcataactaag

SEQ ID NO: 194171 - DNA, 45 bp, Arabidopsis thaliana landsberg
ggctgtgaaggctgcgacgatgattctgaatcttacagcgggtga

SEQ ID NO: 194172 - DNA, 159 bp, Arabidopsis thaliana landsberg
atggtcagcgatcacattacccaggcgataatcggccctggtttaccgcaagcccccgacttggaggcacttgcgagccagagcacgtgacacgtgtacacttctgtccacagggatgaccagctggtgaaaaacattaatttagccgaccaacggaag

SEQ ID NO: 194173 - DNA, 96 bp, Arabidopsis thaliana landsberg
atggtactgtccgagaacgccgccgcggacatagctcacgtagaccgaccgttccgggtagtttccatccaagtttgtgcaagaaccataaccata

SEQ ID NO: 194174 - DNA, 351 bp, Arabidopsis thaliana landsberg
  unsure (1)..(351): unsure at all n locations
atgactgcatcgcggatgtcatacaccggaaagcgatggaaaatcctggaacactgtaggccgttcacgaggatgattccacagttcatgagcgaaattatccctcccgaagtccgtgtcctgcaatannnnnnnnnnnnnnnnnnnnnnnggcaccttaaaaaggtcccgcagaatactatcaccggggactgcggcgtttacacgttaaagattcttgaatgtttattgcttggtgtttcttttgaaggcattattgattcaaatatccaggggctacgagttaggatggcaacagagatctacgatgaagtacctaacagaatgcccactcggttttatgagacatga

SEQ ID NO: 194175 - DNA, 1614 bp, Arabidopsis thaliana landsberg
atgatacttcacagtgtgcgcccttcagaaaatattcaggctcttgttggggaatttgtgaagagctatttaactcttgtgaaggatgaatcagagaatttatcagaagataaacttaagttactaagcatatctaaaggaaagcttattgactgcataagaaaggcaaatgtccacaaaacacagttggcggatgataagactttcacgtttgcattactattagcaattaaacagatgacatggtatatgtgtttcttcggtatccatgtggcatatatctatcttaacaaggtatgtcgaagctcaaatcccatgaagataggattgcacaccctatactcagcagttgaaacagaacacaaatcagatgagacagacatcacaagatcacatccatcactagctgttatccaggggattttacagtcagaatttgcccgggggaactccaaagcattacttttggctgagaaagtgttttggtcctcgctgaagaggctactgatgtccatggggttatcttacaatgacctcaacagtccctccccaagtggaaatcgaccaaatgttcatgaagccatagaacttggtttcctgccgatttcagactgtctaattatctcttacgagtgagtattatttcttcctatagccatatcctcattatcaatgatcatagcttttcacagttgaattttttgggaactagaaagggaaccaaagaattgatatattgcggcctgaaaagcattttcagtcttttagcatggtgattgtaagagataccacaaaatgttgttacttctctgctcgtgaaattgctgcattattgttctttgcatgctaaaacatagctttatcgattctttgttcaatatcttttagtgaaattgtcttttgggagtagttaagctaactagtcctttctttttcatctaaggcaaatttctccatcttttcctgtggagaatttcagcgtcattgtagaatatggaggtccaaatgcctcgcccagatattcttttccttcaaagttggattcctttccttcctttcatttcataaaagtggagctggatatgcccagtgcatgcgggcaactctgtgcaggtgttacagtaccttatagtctcaaaatgataaaggtgagaaacattcaaccttttcttacaagttatattggtagattgtatattacgatggaagagtctgtgaaaagggttcaaattcagagcagtagatcaatctgtatcacaaatagtactttcaatagcatatgatcttgattggttttgcaacactgaaaattatgcaagtttaacattagtatgtactttaacctaaaattgtgttgtcacatcagtggtattcacgtttattccataactgcatattttgaacgctttgtttgaatatgttccagaatatgcagttacgagaacctatgtacactattatctcttttgtagggagacgaagttgagacgaaaactgggtggttggaagaagtgttgaactttgttccacttgaaaaagtgtgttatgcaggatcttccgaaaccacaaatgaatctgaatttatctccatgcctcaagaatctgaaagaaaac

SEQ ID NO: 194176 - DNA, 46 bp, Arabidopsis thaliana landsberg
atggtttgctgtatcaccaacatttacggtatcaccaacgtttacg

SEQ ID NO: 194177 - DNA, 39 bp, Arabidopsis thaliana landsberg
gtactcttactcgactagcacgtcgagtacatcaaccga

SEQ ID NO: 194178 - DNA, 516 bp, Arabidopsis thaliana landsberg
atggcactcaatgtgcgtaacaagctgggttttattgatggtaatatcactaaacctccttctgatcatcgtgattttggagcttggtcacgttgcaatgatatggtagcaacgtggctaatgaattttgtgtgtaagaagattggtcaaagcctattgtttatctccactgctgatggaatttggaacaatatgttagctaggtttaagcaagatgatgcacctagagtctatgaaattgaacagcgtttgagtatcattcaacaaggtgtaatggattttagtgcctattatacagaacttgtgacattatgggaagaatacagaaactatgtagagttgcttgtttgcacttgtggccgatgtgaatgtaatgctgcattgttgtgggagagattgcaacagagaagtcgtgtcactaagtttcttatgggactgaatgagtcttttgaatctacaagaagacatatattgatgctgaagccaattccgactattgaggatgcttttaatatg

SEQ ID NO: 194179 - DNA, 460 bp, Arabidopsis thaliana landsberg
agagtggaaggagagtaagagacatagattagatgatgatgatgacaatgatgatgatgaggagagtgaagatgaattgatggcaatgaggatgaggaggtcgtttgatggaagtggtgttgatattggtaagaaagcttatttggggtctgctcactttgctaatgatagggaatatggaactggttctagtcgtaaaggtttagatattgagaagagaagaaaaccgtatttagatggatcagggaacataggttttggtaatcaaggttatagaaacaggtgtaaggtgagtggaaacgaagctaaaactactcatgcgttgttgttgcagaagaagtacaagcgtgacatgaattttgatgaaccaatcagggtgcaggggaaaaatggtgtcctcaaggtgatggtgaacaagcagaataagataggagggttactgcaaaatgcgaaagcttaa

SEQ ID NO: 194180 - DNA, 407 bp, Arabidopsis thaliana landsberg
ggatgggctggtaagaacgggaacctttccggaacaatcattgggaagatcggtggtatatgaatttggagagtatacgctgaaagccggcgttacatacaagatcgatggacggcattacctgcggttagctgttgcctgtatgaataaagcaccttcggctgataatgtattcatctcaccgcgcatgcggaatacagaacaggaaaccatagatatgcagcaggtgaggagtgctgaattaggctactatatacaggcgccgcggctcagactcagggcaacaggttatgtcacaaagtttacgaagggaatggatgtgctcagcttctatcatgatgcttaccggtcttttgtaaactatgccatgagcggtattgaccggttgcactatggtacagagatgg

SEQ ID NO: 194181 - DNA, 236 bp, Arabidopsis thaliana landsberg
atgaaaaatcagctttccaaattgaaactcaccgaaatctcagactgggcagaaaagcaaaaggacttatacggcaaatattacacagaattatggaaagttaaatcagctatttcttactatcaaagaattagagaaataacaactaagcaagttttcattgtggaagaatataaaagggcatggaacctggcaaagcaggataaaaactttaaaccggaggaactggattatat

SEQ ID NO: 194182 - DNA, 507 bp, Arabidopsis thaliana landsberg
atgaaaggtgagaaagtagaaaacccttttttctataagaaagctaccttacgtaagatggagaatttgagatgcatatttaatgaataaaccccgtacttattcaatgttctaactgcctagctagtcttcaatagccaaggacacagaagaagttattgacgattggatcaatcacattatttacaaattgttgttagtgttggttttgtttggaagtgtaactaaacataaattccaagtgttttgaaggtttaattatcgttcggtactcgataaataaaatgaaaagaaacaaagagtatccaagagaggtgatttatctaatagaagattcattttttgggattgtgttcttcattgtgactttctaagttttctgttccgtagttttcgctccaagacataagcgacaatcctcttgtcttctcagtttctgtctctcgattgccacaatttcaacacaactaacttctaagagtcttgacacttcttaccatgcacata

SEQ ID NO: 194183 - DNA, 303 bp, Arabidopsis thaliana landsberg
cgtcacaaggacttggacttgcccttggtgcagcgatcatggacgctaaaaaagcgtctacaatcgtgaccgtgacaatgctagcgtttgtcttaaccggtggttactacgtcaacaaagtgccatccggaatggtgtggatgaaatacgtttccacgacgttttattgttaccgtcttttagtggcgatccaatacgggagtggggaagagatattgcgaatgcttggatgtgattcaaagggtaagcaaggagcgaatgcggcgacatcggctggatgtcgatttgtggaggaggaagtga

SEQ ID NO: 194184 - DNA, 470 bp, Arabidopsis thaliana landsberg
atggacttcgtaatgggattgccaacaagtccattaaagcatgatgcggtatgggtagtggtcgataggttgaccaagtcggcacactttctggcgatcgcagaaaccgatggagcccaacgtattgcagaaaggtacataaaagacatcgttcgactatacatggggtatccgtgagtatagtctctgaccgggatactcgattcaattcaaatttttggagggctttccaaaaagccctaggaacaagagtgaatatgagcacggcgtaccatcctcaaaccgatgggcaatccgagcgaaccattcagactctagaagatatgcaaagggcatgtgttttagattggggtggaaactgtgagaagcatttgacgttgatagagtttgcatacaataacagttaccaaagaagtattggtatgtcgccttatgaggcactatatggaagggcatgccggatgccttga

SEQ ID NO: 194185 - DNA, 491 bp, Arabidopsis thaliana landsberg
tgttgaaatgggagaagaatgaaactgagaaagaaatatctggaacgcttaaggctatggactgggagatagatatcagcaaactatacgaaggcttagaaccaaacactaactaccggcttgtgtcaatggtaaaatttgaaacagggtcacaaatgttttatgctattgattttctgtatctctgttacagtcttaatatatggaaaatgcagatcggatgtggcgaagaaggagaatacatttgcatggcttataaaaagaaccggtggatcagtctcagatatgaagctttaatagaagaggtaaaacgaaacagttgccttcgtctttcttgagctgaaatttgaacttttatgggtcaaacattattgatatgtgtgatgatgttataggttgtcggtatttggaagagtgtggtcagattctgtggagaacggagggttcggccagagattctattttatgaagctgctggactcgatcaatag

SEQ ID NO: 194186 - DNA, 204 bp, Arabidopsis thaliana landsberg
tctctgttccctctgtatccgccatgcgccgagaacgaccgcatcacggacgtggcggatcacagtgccccgatagcgcagggaacctctcttcaatctcttgcctcaacttccgccgcgcaagtacacgatgcaacagaattcttccgggcggtaccgcgacaccgggatcggcccgcggccgaaacggagctgagtagatga

SEQ ID NO: 194187 - DNA, 375 bp, Arabidopsis thaliana landsberg
aaaattgatccgaaaacaatggatatatttgcagaagatttctcccttgagaaattcgacatcgatttcgaattcgacgctcctcgattctacgatttctccaaacctgaactcgattcagaaacagaggaaacagagctttggtttcaatcagctggaaactatcctccttcacgtaagatcaatatgcatatttttggaattgaggctaaaaagactctgtttcttaattatgttatacttttttttctcagcatttagcatacatttgagatacgaagaaaaacatcttgagatccctaaacccgtctcagatcaatacaatggtattatcttgcaaattcttgtctttgatttgatttcttgcaactcaag

SEQ ID NO: 194188 - DNA, 264 bp, Arabidopsis thaliana landsberg
  unsure (1)..(264): unsure at all n locations
atggctcggaacaagggcgaggtccctcttgatgctgaatcctacgacatcatctgtaagataggcgttgnnnnnnnnnnnnnnnnnnnnnnnnnnntatgcattccgatgaactcaatggtagttgctatcaaagccatcgatcttgatcagtcgcgggctgactttgacagtcttcgccgtgaaaccaagacgatgtctctgctttctcatccgaatattctcaatgcttattgttcattcaccgttgatcgatgtctctgg

SEQ ID NO: 194189 - DNA, 279 bp, Arabidopsis thaliana landsberg
ggtcagaggtgtctgctgaagaatgacatcatcaacaaagtcaagaatcggactctgaaagaccttccagacggcgttcctcttctcatcagtggagaaaacgcgcgttatagactccacggcagtctggtgaactggtttatcattatcataaaccccagccagccacgccccaactactttgggcaaaaatcgggcaaaccgcttcccaacgaggctagcaatcaacccttgggccgagtgtgcggactgtctcactcggcgatacagatcaattga

SEQ ID NO: 194190 - DNA, 9 bp, Arabidopsis thaliana landsberg
atggataag

SEQ ID NO: 194191 - DNA, 76 bp, Arabidopsis thaliana landsberg
gatgatgatgatgaagatgatgatctcagagttttctctcttcgaccatctttggtctctccagggccaaagggtg

SEQ ID NO: 194192 - DNA, 422 bp, Arabidopsis thaliana landsberg
atggaatcattgtcgatcatgtgagtttatttcatggtaaacaataagtgatcacactctcttgtaccagatttatggatgatgtgtatatatcaaaatgttcttctctgttttgacagaaacttaggttggaatagcttaaccggtccaattcctcgagcccttcacaatagagaaaagaaagggctaaaattggtgtaagatttctccttaatatattttttttgttcgtgatgattttgcgtattcaataacattcttgttctatagtgttcaaggaaacccaaatctatgtctctctggctcatgcaagaacacgaaagtcctagtgccggtttttgcgtctcttgcttcattggcggctcttatcgctttgttggctctcatttttgttttgaaaaggaaaaagcccgtatcaaaag

SEQ ID NO: 194193 - DNA, 1472 bp, Arabidopsis thaliana landsberg
  unsure (1)..(1472): unsure at all n locations
atgcaaagcaagctcaagggtttctctcgttctacaaaaccctaccaaatgtaagttctcgttttctttcgatttctgggagaagttagagcttgtacagtgcctctaattgcaataaataacaccaattctagtcggaaagtagatgctttaaaattagggtttgaagcaattgtagacattttgttcattgggaagcgaattaggaaaaaaggcttaagattttttagcaatttctcgatctttgcttatgtgggttttgattgttctttgcttcaggatacgagagctgttagattctttgatcgcaaggtgagttcattgttctcaaatggtctagactttggttgtttaaatgtcgtcattgatttatggaaattttttgaatgcatttgcaggattattatacagctcatggtgaaaattcagttttcattgcaaagacttattatcatacaaccagtgctctacgtcagctagggagtggttcaaatgctctttcaagcgtaagcattagtaggaacatgttcgaaacgattgctagggatcttctcctggagcgtaatgatcatactgtagaactttatgaaggaagcggatcgaattggagacttgtgaaaacaggttctcctggaaacattggaagctttgaagatgttttgtttgcaaacaatgaaatgcaggacacaccagttgttgtctccatatttccaagttttcacgatggcagatgcgttattgggatggcctatgttgatctgactaggcgagttcttggactagctgagtttcttgatgatagccgcttcaccaatctggagtcttcgttnnnnnnnnnnnnnnnnnnnnnnnnnnnnnnnnnnnnnnnatccggcaaatccaatgaatgcaaaagcctgtatgattccctggagaggtgtgccgtgatgataacagagaggaagaaacacgagttcaaaggaagagatttagattcagatcttaagagattggtgaaggggaatattgagcctgttagagatttggtatccgggtttgaccttgcgactcctgctctaggtgcattactctcgttttctgaacttctctcaaatgaggataactatgggaacttcacaatccgcagatatgatattggcggattcatgagacttgactctgcagctatgagggcgttgaatgtgatggagagcaaaactgatgctaataagaatttcagtttgtttggtctcatgaacagaacatgtaccgcagggatgggtaagagactgcttcatatgtggctgaagcaacccctcgtggatttgaatgagattaagacgagattagatatagttcagtgctttgttgaagaagctgggttaaggcaggatcttagacagcatctgaagcgaatctcagatgttcccaggcttttgcgcagtctcgagagaagaagagataaattacagcacattattaaactctatcag

SEQ ID NO: 194194 - DNA, 116 bp, Arabidopsis thaliana landsberg
gcgatattggccagcccctgtgcctagagctcgcaattcgagcggtgccgccggccggtcatcgaatccgccacctcgtccgagagcaggctctctatgcagccgagcagcgttaa

SEQ ID NO: 194195 - DNA, 303 bp, Arabidopsis thaliana landsberg
ttcctggagattctgaaatgcctatatctgttgagtctccagtttctggtgttgaaataaactcaactttagattcttctagtaaactgggcacacaagaaactcctctgttatctgttcctccgcccgagccaatcactgagcggcctattgatcgacttataaaagcggtaagtaaagaaatcataaactctatagcttatccaagtttactttcattaccttctcctatttactgacctaatgtttaatgtctgtactttctagtttcaagcagcatcaccaaaatcattggcagaatct

SEQ ID NO: 194196 - DNA, 179 bp, Arabidopsis thaliana landsberg
atggtccgcaggtaagcgatccgcgcgtgcctgaatggcagaatgctctgcgccagcacgtgtcctgctgggataaggtgtaccgcttaaataaacaggcaggtgtgcagcagctaacggtaacgccggagttcgggccgccgccttatatgctcttgctgccacatacgcttcagccg

SEQ ID NO: 194197 - DNA, 200 bp, Arabidopsis thaliana landsberg
gtgaattccgtggaatttggtaagaaccgcattcagcataaaaaattcaactggaaattttaccagtcacccaacttcaatacctatgtggcccacggtggtgtggaattaggcaaattcgtggcacagaccgcggaaggggagctgaaatccatcgagaactttgttgaatactcactccagcgccgcgccatatcgtg

SEQ ID NO: 194198 - DNA, 328 bp, Arabidopsis thaliana landsberg
atggatgcggccgacgcgatcaatccgtggatcacgggtaactcggcgactacgtacacccgcccggcaacctcgggcacgggctccaacggctcgaacatgtctcagatgaagtacgtcggcatttcgcccactatcgcctacagggccacgagttcggtctttacgtcgccgacgagcggtacgaacttcacgctcaacaagcctgcgggtaccgctgatggcgaccttctgatcgcgtacgtaacatgcacgggcgccaacaccatggcccatcccccggctgactggactctagttaactcggccagcgtcagtacggcgactg

SEQ ID NO: 194199 - DNA, 54 bp, Arabidopsis thaliana landsberg
ggttttgtcatcgcatggttcttatcgtgtttcgatttcacgaggagttgagat

SEQ ID NO: 194200 - DNA, 156 bp, Arabidopsis thaliana landsberg
aacccatcgcgaacatttgtgacttagttggagcagttcagcaagcatgcgtgctcatttctgcgacattgattcatttccgggggtcgtcgcagggaaccaacttcactgacgtcgttcagatatcagcgaatgggttgatatcaacggacaccg

SEQ ID NO: 194201 - DNA, 240 bp, Arabidopsis thaliana landsberg
cttggtgctgagattagaattcctgtcaagaacacacatgtgtatgcatttgctgagcatggaaacgatttgggaagttcaaaggatgtgaaagggaatccaacagggctttacaggaaaatgggacatggttcatcgtatggtttgggtgtgaaactcggtatggtgcgagctgaatatactgtacgtcacaatcgtggaacaagtgctctgtttctcaggttcggggagagatactaa

SEQ ID NO: 194202 - DNA, 198 bp, Arabidopsis thaliana landsberg
tgatagcgatttcgctaatgtgctacatagattgaggatgaggaattacaacattttgctcgcgtgctacgaagaaacgacgcttggtgtattgtgcagtgctgcttccattatgtgggattgggatgctttagttcgagggcaaaatccaactgctaaacactttaatcagccacatgatggtccttatcattcttg

SEQ ID NO: 194203 - DNA, 17 bp, Arabidopsis thaliana landsberg
cagttctccagaactag

SEQ ID NO: 194204 - DNA, 113 bp, Arabidopsis thaliana landsberg
cgtgttcaagtattgacgtttggcatgttgtcacggttcagcatgtttttgcgggtgtgctcgtcgatggacccaacgacgatggaagtcggcatgttgcgtcgattcactag

SEQ ID NO: 194205 - DNA, 1089 bp, Arabidopsis thaliana landsberg
atgtcgaactcctctttgttggacgaaagtaggagagaggacgagtttaataatcggttgatcgatgagactacagagaaaattcagttcatccgaggtaatatgaagaagctcaagatcaacagaaaaatgctaaccgaaagaggcgtgaagtggaattccaagaaggcaacatggtttatcttaaggtaatcgcgttataagggaaagatcgctttggaaaagttggaaagcttgcggtaagatttattggtccatacaaaattgagaagagaatcagagaagtagcttaccgtttgtatatgcgggaagaaatgagattacataaagtttttcatgtgtcgcaactacggaagcatgttccggatcctaatgctatcatacctgagccgatacaagagttgagaacaaatctcacctatcccgaaggacctcttggtattggtgaaagacgaatgcgggaactaaagaatagaaggattccgcaaattcaagtgttatgggaaaaaatcgtaaggttcctacttgggatgatgaggagaggttctcgaaaaatatccacagttttttgaaccaaaaaacgtagaggatgaagccggaccatctaatctttttggaattcgggatgaattctattaaggggggagggggagaatgtagtgactcgcgtaaggacatcgggcacggacaagagtcctaatttaagaaagttgcctgaatgcatggccatttgaccctaggtgcccaaaactcaatagcctatcataggggaagtttgtacaagaatgggctcgtatgagcaagtttgggtaagatcgtccgtgccgcgtgcgaagtttgccccgctaggcgttgaccgcatggcacgactaacttggggcccaagcaaagttgcttggagccaaatttgagttgtgtggagccgaagtttgtgtggccacgtgttgctcatcttctaaagcggcgagcgtgtcatcacgggctgataacacatggattactgactcgcccatgcgcttgacatgtggacatgctgactcgcccttgccttgcctatataagcccaactcgaccccaaatgatttgtga

SEQ ID NO: 194206 - DNA, 890 bp, Arabidopsis thaliana landsberg
atgttattcaggatccgaacagagttaaaccgggtaaaacccacccatttgaattaattgttgaattatggctcaaatcttcaacattatcttcaaaaatcccctccaaaaatgtatatatagataacgataactgtcgtgaattgtttctttcccaaaggactctgtgttgttgcctttaggttttatgctgttttagggattatagcttttatattcctttgagggtaacgttttatttttgtgaaactttagaggttggtttcatcaaaatctgattttccatttccatgcctatcattaataatcgtaacgccattaaacggtcccgtacgacgatcataatcagatatacgagatacgaagattggtaaagaaacagagtagatgcgctaatcacagaaaagaagccactaccttcaaattcactaattgtgagagacgatttaaatcaacaggatcagagagaacaaaatatttggtaagatttgtttcgtggtctttgtatacagtagttacaaaaaggagagggacaaaacgctgcgtttccaaagactagatttcttgggacgtggtggtctgaaagcatagttgacgccaaacatctctgtggaagtcaacttcatgtccacgaacccattgagcttaccaacgagggaggcgctctctcggacatgacccatgtctttgtaatccgaccagagacgacgcgccagctggagccgtctgtgattcgtgttgagcccaatgccccatctcaagaacaagttctctctctcttctttcgacagtttcctctgcatcagcttgctcagcttatacctctccctcgtcaatgccctcgtgctgcttgtttttatatatattacattactttagtgtcttactaa

SEQ ID NO: 194207 - DNA, 150 bp, Arabidopsis thaliana landsberg
cattggacgattaccaatgcttgcatacctcaagcggtcattctctggtacaagaacgtccacgaacggtcgcgctgttgcttcaccctgaagcggtacgctaggctaccgacgaatgcggacaattcacaactgctgcctaccgtttga

SEQ ID NO: 194208 - DNA, 2870 bp, Arabidopsis thaliana landsberg
atgccgtcggaaatagtgagtttactcgccgtgaaaacccatcttcgccgtcgtaagtagagctgtgtgtcgccgtcgaatctcttgcgtttcccaggtttgattttataatgttagcttaaatcttcgttttcgaattggttaattcgatttttgttgttgattatgtgaattcgttatttgaatcctgattcaatcgacagtttgacatttgcttaagcttcgaatttgaattttgtttgagatttgatgattgaatttgtttctaaaatccttgtacattcgttatactgttctaaaatccttttgaaattcgttatactgtttcgtgatatatttgcttatgtgaatttgttatactatttcgtaatagattttggttctggtttagtgtttacctcttttgcatatgctttcgtgatagatctatgccacttacgctttaaaacgatttgtaaaccatgttaaccacttttcaaagcttttaaaatcccttgtaaattattctatgctacttacttacgctttaaaacaatttgtaaaccatgttaaccacttttcaaagcttttaaaatcccttgtaaattattctatgctacttacttacgctttaaaacgatttgtaaaccatgttaaccacttttcaaagcttttaaaatcccttgtaaattattctatgctacttacttatgctttaaaacgatttgtaaaccttgtttctctctgtagtgacagtgtttttgtgggtgttgattttgttgttatttatcttatcaggttataatgctagaattgtattctgtttgtggcttgtggaagttgacaaacaatatgacttgggaatttgaattagacattgaattgggagcttctttagtgctcattgatgagcacattacctatcacgcgttggttgatattcttgtagaggattttcaaatagatagttcaaccaattctttgaagcttagttacaagttagtctccacgtctacaaccatacaatctcatcctctttatattaggaacgatagacagcttgcaacttttatgcacaaattctcacagagtggaggattgcttcagttatgtttgactgtagagcaaatttctgtgacagttgagcaggtttttcaataaccttcttgtgttataatttaaaaaatccttgtaaaatcattattaagtcagtgattgtgcttattacaggcttagactacttcaaatccttttgtttctcagtctgtccctactgctcaggtactaatcgttttaaaaatccttgtaaaatcattattaagtcagtgattgtgtttattacaggctgagacgacttcaaatccttttgcttctcattctgcatctactactcaggtaataatccttttaaaaaatcttgtaaaatcattattaacgtttttaaaccccttttaaaaatccttgtaaaatcattatttaagatagattgatgtttgaggtaagctttttattttggcagccgaggttaacctctaggattattgaggcgtgtgtatctgaaacatctagtattcttgatcaacggtattctagttttgcgttttcaacaggtttaagtgatgctgattctttgtttattggaaaatttttcaaagacaaagatgaaatggtattcacgttgcggatgtttgcagtgaagcacagctttgagtttcatacagtgaaatcagatctcacgaggtatgttcttcattgtattgatgaaaactgtagttggagactacgtgcaactagggctggtggatccgagagttatgttattcggaagtatgttagtcatcacagttgtgactcttcattaaggaatgttagtcatcgtcaagcatctgcaaggacattcggaagattgataagtaaccattttgaaggaggaaagcttcccctcagacctaaacagctgatagaaatatttagaaaagatcatggagttggaatcaattattcgaaggcttggagagttcaagaacatgcagcagaacttgcgaggggtttacctgatgatagttttgaggttttaccgaggtggttccacagggtacaagtgacgaatccaggttctatcacttttttcaaaaaagattctgctaataagtttaagtatgcgtttctggcttttggtgcatcaattagaggttataagttgatgagaaaagtcatatctattgatggtgcccatctgacatcaaagtttaaagggactttgcttggtgtctcagctcagggatgggaattttaatttgtatcctattgcttttgcaatagttgactctaaaaatgacgcgtcatgggactggtttttgaagtgtttgctgaatataatccctgatgagaatgatttagtttttgtatctgaccgagctgcttctattgcaagcggactttcagggaattatccacttgctcatcatggactttgcacttttcatttgcaaaaaaacttggaaacccatttcagaggttcttcacttattccagtttactatgcggcttctagagtttacacgaagacagaatttgattctttgttctgggaaatcactaatagtgataaaaagttagcacaatatctttgggaggtagatgttaggaaatggtctcgagcttattctccttcaaatcggtacaacatcatgacatctaatctagctgaatctgttaatgccttgttgaaacagaaccgcgagtatccgattgtttgcctatttgagtcaatcagatatattatgacaagatggtttaatgaacaacgtgaagagagtagtcaacatccgtctgctgttactataaatgtagggaagaaaatgaaagcgtcatatgatacttcaacatga

SEQ ID NO: 194209 - DNA, 165 bp, Arabidopsis thaliana landsberg
actactgtgcaggcaagttcccggtagcttctgaccccggaggcaaaattgcaacaacctatggcctgaagttaatggctccgcagcccggtgttaaagatgtacggggcgagaaggttacacacggtttcatcccccgaactacatttgttatcgataaaaaag

SEQ ID NO: 194210 - DNA, 216 bp, Arabidopsis thaliana landsberg
gtctccgacgcggcgtgggcgcggccgccttttcctcctggtgtcgagaccgccaccagcaacggtgcccgcggcggcagcgtgaacgtggaggataagcagcggcggcgccacgacgactgccaccccgacgtcgttcccgagaagatcatacaggaggacgcgccgtcagttgttgcggagaccgctgccgcccccaccaccacggaggtggag

SEQ ID NO: 194211 - DNA, 188 bp, Arabidopsis thaliana landsberg
atggccgtcaccggagttgccgtgctttgttgcggctgtgccacgctccaagtcttccaccacatcgtccctagctgtaacagctcaccgatagccgccgtagctcctcagccggtgatcgccggaggaagcgccacggtgaaagccaccatcccatgcaccagtatctctgttttcctccgaccgtc

SEQ ID NO: 194212 - DNA, 90 bp, Arabidopsis thaliana landsberg
gatggaatcttccgagtagtggctgcaatccttcatctagggaacatcgagtttgcaaagggtgaagaatcagaagcttcagaacgctaa

SEQ ID NO: 194213 - DNA, 716 bp, Arabidopsis thaliana landsberg
agctcttccgctcggcattcaagccactgcaggtcaaaggattagacggagtctccgtatacggattggattctggtgccatcgttgctgtaccggaggaagaaaaccgggaattgattgaaccgcctccaggatttaaggataatcgagtctccaccgtcgttgtctcgccgaaattcgagagaccgagagagctagcgagaattgcaattctaggtcatgaacaacggaaggaactccgacaagtcatgaaacgaactaggatgacttatgagtctcttcggattcatctaatggcggagagtatgaagaatcatgtacttggtcaagggcgtagacggaggagcgatatggcggctgcgtatataatgagggatcggggactgtggttgaactatgataagcacatagttggtccagtcacaggggttgaagtaggggatatattcttctaccgtatggaattgtgtgtgctgggtttacacggccagacacaagccgggattgattgtttaacggctgaacggagcgccactggagagcctatagctaccagcattgttgtctcaggtggttatgaggatgatgaagatacaggagatgttttggtttatactggtcacggtggtcaggatcatcaacacaagcagtgtgataaccagaggctagtaggtgggaatctgggaatggagagaagtatgcactacggtatcgag

SEQ ID NO: 194214 - DNA, 433 bp, Arabidopsis thaliana landsberg
atgcgccgcgcgctgcagcccctgcatacaggcatccagacgcgtgccttcgccggcttcttcggcttcccgatgagctatcgcccgctgggcgcacagacgagccggccacagctgccgggcctggcatttccccaagtgcaggtgcaggaccagatcctgcctgcccccggcgagtccccggaaccggcgccggggcgtcggcagcgtctccggcgactggctgcccacggtcagtggcagaacaccacccgctggcccagcacaacgttttcctatgtcgaggcggtgggcttcggctatctgcggcgcctgtggcagtggctgcggccaccgaccacgccgcgccacaacgacgaccattacggtctgccacacgcataccgtgcgctcgcgcggccgcgcttaatgggcgaaaccactggagcgtcag

SEQ ID NO: 194215 - DNA, 79 bp, Arabidopsis thaliana landsberg
atggagcacaagtgttataaaagacttgaggctgagaagtaccgaacagacatgaaagagaggccaatgaccaaaggtg

SEQ ID NO: 194216 - DNA, 331 bp, Arabidopsis thaliana landsberg
atggcaaaagaaactcggtggtttggtcatggaagtcggattatcattacaacacaagatctgaaacttctgaaagcacatgggatcaaccacatttataaggtggattttccaccaaattcagaggctcttgaaatcttctgtatgtatgctttcaagcaaaaataccctaaagatggtttcgagaagcttgcctgggaagttacagttcttgccggtaaactcccattgggactaagggttatgggctcctatttccggggaatgtgcaagcaggagtggaaaaatgaactaccgtggttaaggaatagccttaacggacaacttgaga

SEQ ID NO: 194217 - DNA, 216 bp, Arabidopsis thaliana landsberg
atggtaaacaagctgtgtttagggcttgtggattttggatctcactattacggtatagccgatagactcaacaaacactacgaaagccgtcgcaatagatccatagccacactccggcgagtttactttaaagatctttggaccggaactgccaccattgccgccgccgttatcctcgtgttgactttgattgggacggttgcttccgtactccag

SEQ ID NO: 194218 - DNA, 1268 bp, Arabidopsis thaliana landsberg
atggcgcccaagaggaagaccacgaactcgtctgctgcagtgatccccgccatcgatcccaacagtcagttacccttcgcaggtaaccatatgtctgtaatttctgaagttgagcttctccgccttgtctccatcggggttctccgtccacgggaactctgttcttggcgttcttggcgtgggactactgttccgacagaggatacccatgagtccgttgtttacgcccctttccttctccgcggccttggccttcccatctctccctttttccgcggcctccttgatttctaccatattaacttgacccatttgaaccccaattcaattctgcaaatctccattttcgttcatttatgtgaggcatttcttggcgtgctgccacatttcggtttgtggaaatacttgtatcattgtcgccctgggatggccgggggacaacatcagttggtcgggggcgccacttggaaatgcgtcgcgggaggaaactgaatactcgagatcccctcaaggacagtattagggatggcgcctagagtgttcatagttgagaattatggaattctctcacctctcggtcgggaaggcagccggatgtccgcaccccaagctggaccgagtctcccacagatcaggaggtagctgaggcaggtgtgttgctagctgaagttggactgctgaaagagaggggtctaactgctgaagctgtggttactgactttgttttcaagaatattcagccactgaaagaaagggcctatccagcttatctgtatcgagggctagccgactcaactcgggttaccaacaggagaattccttctgcagacttggtgagccgacttgaaatgatcctcaggggcaaagtgtcaaatgttggtgctccagtggcgtactcggcctggaacttgcctcctcccaaagccttcacccttttcgtgtcgaatccacccgttactgatggcagtttgggccttagagtgcgaccctctgctgaagaagttagtgctttggttgcctcgctcggggagattcctgatgacgaacggcaggtccattttgaggtgcccctgaaccctagtgatgcggagataagtgctatgcttgatttgctggctgaggactcttctgacgctgttcctgctggggcattggtagtggcgcccctcccagaggctgatacaactttagatactcagaagcctgctagtactcgcccgaggcgcccttgccgagccaatcaacctgatccttctgctgatgagtag

SEQ ID NO: 194219 - DNA, 291 bp, Arabidopsis thaliana landsberg
cggcagtcgcgacgccgcaccgtgtgttcgcgggacctgaaactacttggaacgccgccggcgctgctggccgagacccatgtccttggccagttgcgagcgggccgccgtataattgggggcgaccatcggatagtccgggccgggattccacttttcgcagagctgggccggtgtcatgttgtactgtgtacgcaggtgacgcttgagggaatcgactggattgtcgtcttgaacactgacaatgtacaccaggcgttgtctatttctttaccgcgacggccggtctga

SEQ ID NO: 194220 - DNA, 170 bp, Arabidopsis thaliana landsberg
atgtgcgtggcaatgcagttcacgaaccactggtcttgggtggagaccagcacgctgactgcgaattccagcatggcgtcttcgagggtgcgcagggtttacacgtacaggtcgttcgatggttggtccagcagcagcacgttgacgcccgagagcaacgccttggtcag

SEQ ID NO: 194221 - DNA, 88 bp, Arabidopsis thaliana landsberg
atggattacaagtcaaccaaacatcagtcacaagacgatgtgaagcgaatcaaatatctcgaagatcatggccgaagagaaaggatag

SEQ ID NO: 194222 - DNA, 403 bp, Arabidopsis thaliana landsberg
gtggatcccggatgcaatagtttttaactcgtctcatctatatggaactcctagctattgggtccaacagttcttcaccgagtcaagcggagcaactcttctcaattctacacttaatggagacacttcttctgttgaagcatctgccatctctttccaaaccaatggcaaagattacatacagatcaaggtttgcttatctcccatacacacaaaacaaatgtctagaaccaaatgaatgttctgaccaaatatgaatacacaggctgtaaactttggagaacaatcagtaaatctaaaggtagcagtgacaggactgatcgcaaaattttatggatcgaagaagaaaatacttacatctgccaatgtgatggatgagaactctttttcaaacccaaagatg

SEQ ID NO: 194223 - DNA, 246 bp, Arabidopsis thaliana landsberg
gagtatcaacgggactgcccgcatcatgacttcagtgaggtacaacttcttggtaccttcttcaaagaagtcgattggagataccagatggctttaaatgcatcgagcaatggtaactttaacacgagatattcagctgatgctaccgctctgatagagaatctcgcttgcagtaacaacaccaagaatgctaactctgagaggaagaagattgttggagctgtttcgggcaatcagatggcagag

SEQ ID NO: 194224 - DNA, 155 bp, Arabidopsis thaliana landsberg
atgatgatgaagttagccaagagagagataacaaaaacatgtggctgtgtatgtaaaagaccgagtcacccgaacatcttcaccttcacgccattctcctaccactcggacctaaccaaccaataccttccacgtcatgtacaatccgagttccc

SEQ ID NO: 194225 - DNA, 283 bp, Arabidopsis thaliana landsberg
gatatcatcattgttctgaaagcatctttttgtaccagtcccatccaatctctttactttattcgaacaaatgtaattaaacaattgcaagtcatcgagcaaataaataatcgttatctttggtttttgatgcaaaataacttcatgagtaagaaattatcgattataatctgtacttacaatcgggacagatatatcgctgaatctatacaagcatctttagatcagacatcaaatcccgataattacgaagtgatcgtgatcaacaacaagtctacggatc

SEQ ID NO: 194226 - DNA, 267 bp, Arabidopsis thaliana landsberg
atgctggagatctacggggtcaccgagtcggcctggcgcgagagcaccatcgccccggcgcttttcgtcatctcctagacgccgcgcttcgtcggccgggcggtgccggcgctggcggtggatgtgtacaaggggcgtttcatcggtcagtcgctgtcgagcggcgggctgacgaagctctatgggttcgatgacgtgcacgggtctagcccggattgctcacggtatatggaccaggtggtgcagccgggcaaggagccggatacg

SEQ ID NO: 194227 - DNA, 183 bp, Arabidopsis thaliana landsberg
atggaagccgtggccgacgacatcatgctgatgacgcattttgccgcgtgcgacgaattcgacagtccgcaaacacgcgatcaaatggccgcgtttgaacgcgccaccgccggcttgtccggcccgcgctgtctgagcaactcggtcgtcgtgctggcgtggccggacgtgcgcgggcagtgg

SEQ ID NO: 194228 - DNA, 1035 bp, Arabidopsis thaliana landsberg
gaggtcctaagggtgcgattcgctactctctagtttttgctgctgtaggcacagcatttgattatgctacccttaaaggaaaaccaatgttagagagctaccgtaacatggagtcattcaagttacctgaatggtctcctattaaagtcctcgacgaagaagccttagcaaagaagaaagctcaggaagagaagatattccccgaaagagtcctcggcaaattgaacaaagaatagtcttaaccaacttaagattatttctgttttgcccacataaatttcttaagttggaattttgtttatcggtttgatgtttcgtgaaagactgaaagtaattccagaccttgtagatgagacttgaggaggattttggttttttgttgtttcctcaaggtaaaaattttcttgagacataagaaaacatctttgtatgctgacctacccataaagcgtatatattcatggttaattatgggctatagatgacttttggcttaccattgttaaactgatatgacccacattcatgaattcgagctctgattatgatacaactaactagtatgaaccgctaactacgcataatggtcaatatatttggttattataattcttctgttttaattagtcttacacctatatgcaaatttttatatttttctttgattacatcaataatccggattaagtcctagtaattcgttggataaaccaattcatcgctagatgatccgatcatgttacaaaaaaatcgggtcaaaggcccaaaaagcacaaataacctgccccaagtttgatagagaaatcaaatgcggagtttttgagtgtttacgtcatgaggccctaggtccaaagttctttttggtattaatcttataccattttcgtttctaagagatggttacagaatgatacaagtagcggaaaaaaccgaaaaaactacaatgcgaaagaaaaagaacaaggaatagacgccaactcgaacaaaagaaacgacgagatggataagaaccacaacacagaaaaacaattgtag

SEQ ID NO: 194229 - DNA, 186 bp, Arabidopsis thaliana landsberg
atggtagacctaggttgccagcgttcacatatgttagactgtctgatgaacttcgacctgaaccagatttctcaacgtttccaattctctagacccgaatgcttgcgaaccaagtctgcgatcaaatcgagccctattcgagatgcgtatgtgatccttgaccatttaacatttgtccgaccaagg

SEQ ID NO: 194230 - DNA, 372 bp, Arabidopsis thaliana landsberg
atgaaggagatgcctggaatcatgagtcggatgccggctctaccggtttcaattaatgatgatcttgcaagcaatctattgtcgagtacaactcaggtaatatattttgctacatatgtcaaaatagctaatcctgaaaagttcgccatgtgacctcaaataattagagcttcttgacccaaaaagtgaaacatattaagatatatatatgaacatagaaaccattaatgttttttagttttattgatctcttgaggatttctcttggaagctggccatgcctgatgtttagtggattgtttccctgtctcacagccaatatcgtacaacattccaccaagcatccacctgaagcaagagccaagaagttga

SEQ ID NO: 194231 - DNA, 467 bp, Arabidopsis thaliana landsberg
atgatcgagcaattaccctccagctatcgcctgaaacgatccgcaaattggttcaggcagttcttgccccctgcccgcaggcagcctgtacaaaccctgctcctcctgttatttatcctgtctgccggaacagcctacccgcagtctgcaaccctgacaccagttacggacctgggtatgcataccgtagcggtgacggtaccttcaaaatacacggctgcatttcctgcgggaaaaacactcagtgtgcaagctgattacaccgtatcggtattccatgccggcggcctgaccaagccaaggttcatgacatttagcccttcgggagtgttgcatgtggccgatatgggcgccgggaaaatactggccatgccggatgcagatcataatggagtggcggatacggtcatagaagccgaaacgggattttccggcaatcatgacgtgaaattctataaaggatccag

SEQ ID NO: 194232 - DNA, 408 bp, Arabidopsis thaliana landsberg
atggcgatcggattactagcgtttgagagccaccaggggctctggaacagcggatactattcacagttgtttggaattggaggagttctcatcactcttaccattcttatgttatccacgggctactttgggggaattggtgccccatttgctccatatttctggccgtatctaggacaagttccaaagaagagggaacgcaaaatgcctgtgagagtgtacatggatggatgctttgatctcatgcactacggccatgcaaatgcattgcggcaggccacattgctgggcgatcagcttgtagttggagtggctagtgatgaggagatcgtggcaaacaaaggtccacctgtcctttctatggaagagaagttgactcttgttagtggtctcaagtggatcgatgag

SEQ ID NO: 194233 - DNA, 373 bp, Arabidopsis thaliana landsberg
cgcttggatgagagggcgtgtccgcttcggcgcggggactcgtctcggcaatgcttcggtgacgagtgccgcccgctgccgaggcgggacagcgccagtcgcgggagctgtgggcaacggcgccgatgggagcacgtcaagccccagcagccggatggagtcggtcggtacgagtccccgccaagacgcggcgcacgtgtcagacggcgaagggctcttgcctccgagcgtccctccccaggcccatcccacaaggcgcgaccgaagctcagcggcttgcttcccgtcgccgcgccggactccgcagccttgctactgacgagctcagcgacgagcatgccgagcctgcggatcccggctggttgtgctcgag

SEQ ID NO: 194234 - DNA, 113 bp, Arabidopsis thaliana landsberg
atggcgttgcatcgaagcatcagagagattggtatggtggtggtggtgagagagcatcaacaacagcaagaagagaaagcgataatcgaactgattaagatcgtgaaatccaa

SEQ ID NO: 194235 - DNA, 162 bp, Arabidopsis thaliana landsberg
catggaacagtgcgtgcagccagaccactggcgaccgagggtcccccacgttggaattcgagttgatcgatatctttttgcaagtcattagtttcggcgaaggacgcaacgcaatgatcgatgtcggcaatgagatctgtgccgacctgatacctgccgtct

SEQ ID NO: 194236 - DNA, 398 bp, Arabidopsis thaliana landsberg
  unsure (1)..(398): unsure at all n locations
atgcagttgggagagttacgacgacaaaggagaggtgatgcgcacaataaagtccaaaagactaatgggacagaagatgtgttgtggatctcagctcgtcgattcgtacattaacgatcacatacgtgacatgagtaggtacgcgaaatcnnnnnnnnnnnnnnnnnnnnnnnnnnnnnnnnnnnnnnnnnnnnnnnnnnnnnnngagaagagagcacaggatgcaagggaatgggaggcggctagagccgagaaacagatgttggataatcttgctgatcgtctcaagggaagtgagtgagaaaaatgatactataattttgttagtacaatttatttatcctgactttgctaccttatttttctcattatatttgcagagattggatatggcgtaa

SEQ ID NO: 194237 - DNA, 673 bp, Arabidopsis thaliana landsberg
atggagatcattaatagaatcaacgtatttccgtcatctatttgtgtttgctcaccgaaactcttcctcgtcgtggtcactcgtgtgcgggacatttggttggtcagtcgaggaaatggcggggttctacggatgcaagagatatggtcttccccgtaggctaggttcatacatcccgcctcatggcttggtggataaacataagatcgtagcctgcgcggacggattggttttgcttcaaaccgtaacgaaaggagagacgttcagtgtgggtagcccggcagtgggttcagctcccacctcacccttggaaagggatcagttcatcagtttgggcaataggtctagtcacccgagtagaagacggtgtcgttatggagtataaggtggtttgtatggatattgattaccgttgggaagtcgattcccttatcttggagatatattcgtcaactgacgggaacgtggactcgcaaaaaagtccgttgtcctcgtctcatcgactcagcgactcatcgtgtctttatcctataaaagatgcttgagtttgaagaagatgcttcactggcttgacacccattatcgttatcggagtagcgtgggagccattgtagcatatgacttctatgctgatgatgatgagcagcagtttttgcattatcacttttcctga

SEQ ID NO: 194238 - DNA, 315 bp, Arabidopsis thaliana landsberg
atgcaggaagagctcaacaacttcaaaagaaatgaagtttggagcctggtgccacgtccaaagcaaaacgttatgggaaccaagtgggtgttttgcaacaagcaagacgagcacggggtggtgacaagaaataaggctcgacttgtggcaaaaggttatgcccaagtcgcaggtttggatttcgaggagacttttgctcctgtggctaggctagagtcaatttgaagtttgttagcctatgccgctcaccactctttcaggctatttcaaatggacatgaagaacgctttcctcaatgggccaatcaaggaggag

SEQ ID NO: 194239 - DNA, 157 bp, Arabidopsis thaliana landsberg
ggttgattgcatttacaactacacaaagaaagaagatcaactaatgactgctgccttcggcactcggtcgaaacgaaggttaaatcagttaatggatgtcctgaaattcgagtacctggactatgacagacttgacgaaggggctgatgagcaaaaa

SEQ ID NO: 194240 - DNA, 71 bp, Arabidopsis thaliana landsberg
atggaccaaatgtctgaaacatctgatcaaaagctggcattttcatttacagaagtaatgattcatcaaaa

SEQ ID NO: 194241 - DNA, 145 bp, Arabidopsis thaliana landsberg
attcaagcttgcttttctactctctccgttcgatcctcgacgaagaatatgcgatcgattgaaaagagctgtttcggattacacgatagattttagattttcgcggaagacaaatcgctacaacaacatgtatgttctcatctaa

SEQ ID NO: 194242 - DNA, 138 bp, Arabidopsis thaliana landsberg
gcagcgttgatcctgggttcagccggggcaatcagaggtccaaagttgcccagcaaggctgtttcgagttcaaccaggtgttgcgcgggcaaggcaatgcgcaggatcggacccggttccaggcgcaacaacatgggt

SEQ ID NO: 194243 - DNA, 381 bp, Arabidopsis thaliana landsberg
ctgctgcccggcttgcctgcgcccatcgactacgactacttcgtctggaaaggcgtcgagcccgacttgcatccttatggcgcctgctaccacgacctgtccgagagtcgctccgccggggtcatcgagtacctcacggtgcatcaggtcggcgcggtgatcgacggcggactggccatggagtactgcgtcaagaccgcagcccagcaattgcgccgcgccggcttccaggtgctgttgtacctgccggcatcccgcgccatgacccaggaaggcgccatcggcgcctgcggcgcgctgacggcggaaggcgtcatcctctgcggcgaagaggccgcgctcgactaccagctgtctctgatcaaggaagaccgcccatga

SEQ ID NO: 194244 - DNA, 550 bp, Arabidopsis thaliana landsberg
ccaaaggctgcgtcggaatcctaaaacagctcatcgcaccactggaataaccggaacaatccggctgcggccgctgcgaattcctcccgggaatacaattcccaacgaaatcaaacccgaaactaaccctggaagaacattcagagctaaacccagagaagaaattgaacgcaacagtgagattaatcagattcctcaacgaacaaaccaaatcaggaacctccccagagaatttattgtgagcaagattcaaaatttcaatcgccgacaagcaagagatcgtatctggaacatgacccatcaatgcattgtagctaacgtcaaagacttcaatttcagagaacataccaacagattccggtatacaaccggttaactggttattcaaaagcaaaacttccttaaccctcgatcccgtcagaccaaaactcgtcggaatttcgccggaaaatctgttattcgcgagattaataaccgaagccggagaatttccgaggtttcttgggatttctccgacgaattgattgttattgaggagaatcgcgtctaa

SEQ ID NO: 194245 - DNA, 681 bp, Arabidopsis thaliana landsberg
atggaagagtttctagacgaagttgatgctgttggtggggttggcacaaaaggagagtattggacgacgtacttctcggctcaccagatgggtagttgtaggatgggagtcaccgcggaggaaggtgcgttggatgagaatggtgagagctgggaagcagagggattgtttgtttgtgatggaagtatattgccatcagctgttggggttaacccaatgatcaccattcagtctactgcttactgcatctcctcaaagatagttgactcgctgcaaaacaaaacaaaagtatagagaagtaaaaaaagaaagaactgaaaccatcccattagtattcatatcgaataaatatgtttttccttgcaagacaaattttgtttaagaatcatggaataacttatcttgacgacaacaaagatgtaaacaaatgatatatcatatatgcaccaagattcaagaacgttaaagctgttttttttttgttttttttgataaactctatcggctgatctggtcagcaccggtagaaacgcaccgaagtatttcagagtagacttctccccgaaggaccaccacactgtctgtcccgagtttggatgccttccgactaatgccagggggtaatcaggccgcctgtatttctgcctactaggtaaaccaattgggccaaaatccaactga

SEQ ID NO: 194246 - DNA, 362 bp, Arabidopsis thaliana landsberg
atggccgtcacgtcgtgcacggcctcgccgtccgccaggcccaagcggtcgtcgccgaaacggcagagcctcacccttcagctcctttataaggtgccctaacgatcgccttgcataaccctccctgtcgcgctcgcctagcgctgcttgcgaattgccgtcgggcagtgcgagatggggttgtctagtagggggtcttttgattaggctcccttatctatctgctcgtgttccgataaaggccggcagagtgcacggcgcgaccagacgccaggatcgcctcgataacggggcaggggaggaaaactatggagtcgtcccccccccccaggcgcttgctcatctctgcggcgataagcaag

SEQ ID NO: 194247 - DNA, 63 bp, Arabidopsis thaliana landsberg
atgggatattgggttttgaaatatcctcaatggttaaagaagcatactataaacattggaaag

SEQ ID NO: 194248 - DNA, 318 bp, Arabidopsis thaliana landsberg
tccgagatccctgaatccttggaggtaaaaaaggtacacaatacgcattggagtcccaagtcagagaattgtatccagtttgtcaaagacctgctccgaacttgtgaagcgggacaaggcgaccaccacaattgccgctctgaacacaaacctccactacccacaagagtcattcgaatcgaccctgaagacgaatcattaagtctttatgagccccagccaagcgaaacaggcgcttatgtcgccctgagccactgctggggtcctcctagtcgacaaccgatccggacaactcgggaaacgatatcacagatgagg

SEQ ID NO: 194249 - DNA, 980 bp, Arabidopsis thaliana landsberg
  unsure (1)..(980): unsure at all n locations
atggtgggccaacagctccagcagcaaggtgggcggggttatcaacagggcccccgcgaaacttcctacctggacttctcagagacacgtccacccttgtttgttaaagctgaagatccgttagaagccgatgaatggcttcgtgtgattgaacaaaaattcggacttctacgttgttcggagacccagaagcctttatttgcagcccagcaactacgcggccctgccagcacttggtggggaaatttcgtggccnnnnnnnnnnnnnnnnnnnnnnnnnnttgggaagaattcaaggtggccttccgtgagcactatataccagaaggtgttcttcacatgaagcaggaggaatttatgaagctgaaacaaggaggggatactgttaatcagtatctcaataaattcaatcatttatcccagtacgcaatcgatcaagtgaacacagatgtgaaaaagaagaattgctttatgagaggttaaatgatcgactacaaataaagatggcaacctacatagatcttacttatggaagagctgtcagtacagcattggcagttgaagcaaagtatgcaggcgccggaaaatccaagggttttggaggtgacaggcctagtcagggcccggtgaaaaggcaacgatttgttatccggccttccaaccagaatcactctttctctcgtccaccctccttcccttttaagcagccagtatttattcgtcccaataatgcccccactgcatcaagtcagcagggtgcccaggcacttgattccctgcccttcccagttcatcgactggatgtttcaattgtgggaaatctgggcgttttatcaaggattgcccttatccaaagcagaaccagtcaaataatcagcaaggatctgggaattcatctcaagccaagggaaatactatgggcaagaatactaagaagacgggacgcatatattatacacaagtggccactacaccggatg

SEQ ID NO: 194250 - DNA, 476 bp, Arabidopsis thaliana landsberg
atgcccgctgtgagtcagcagaagagcagcagcaacaagggcaggcgaagggattgcttcatcaggagatctcccgctgttgtgaatcgctcgactgtgagtattgtaagtggctgcagggaggatacgtgcgagcgatggaagcgtcagctgctcgtagttccaggagggatgcacaacggtaaaagcgcacaagctccgtattttgcgaagagaggattttgtgcacggttcagaggaaagatgacttgcacaaatttttgtttcaatagagacttattttcggaaagggaacgaaagccatggcacagaatgagaagacacagtcacaacagcagaaggtgtgggaggccctggaccgtttccgcatcgagattccctcctgggggttcgccaatacgggcacacgcttcggaaagtttattcagagcggcgcggcgaccggcatcgcggagaagtttgccgatgccggaaag

SEQ ID NO: 194251 - DNA, 48 bp, Arabidopsis thaliana landsberg
atgtgtctggaggccatcttcgtgatcagtccaaagatccgagtgttg

SEQ ID NO: 194252 - DNA, 1755 bp, Arabidopsis thaliana landsberg
atgcagcttgcaggaggaaaaaacgacaatgcggctcgccggagctcgccggaggaagaagcccgaagaagaaaacgagctcgtgctcgaggttcgtttttttttttgttttcagtttttgttttttttttcaaaatgttttcagaatattaattattcattcaaaataaaatataggggtaaattcgtcttaacacaattcattaactcaaaggggatatgaagactctaaagtggttttgcagattatttgtcccacaaaagggacacaaaaaatgatcattcgccaaagactcatacggactttggctacaccatcaaagctttgagaagcaagaagaatcttggttagggtttcggatttgaatatgacctgatgtcatgtgtatgattgagtataagaacttaaaccgcaaccggatcttaaaagcctaagtattgtatccttgtaagaagacacaaagacaaagactcatatgaacttcgactacaccatcaaagctttgagaagcaagaagaagcttggttagtgttttggtgtcgaatatgacttgatgtcatgtgtatgattgagtataaaaacctaaaccgcaaccggatcataaaagcctaagtagtgtttctttgttagaagatacaaagacaaacactcatacggactacggctacaccatcaaagctttgagaagcaagaagaagcttggttagtgttttggagtcgaatatgacttgatgtgatgtgtatgattgagtataagaacttaaaccgcaactggatcttaaaagcctaagtagtgtttccttgttagaagatacaaagccaaagactcatacggggtttagctacaccatcaaagctttgagaagcaagaagaagcttggttcgtgttttggagtcaaatattactagatgccatgtgtatgagtgagtatgacaactagaaccataaccagatcttaaaaacctaagttttgaatctttgttagaagatagaaagactaagactcatacggacttcggctactgataataggtttttaagatcaattaatcctaaagcactatcatgtcgttgtagtactgaaggttgtcaatccaaatgggtgtgatgctaactatcaagatgtgatcagaagtcactaagttaagccaagcaataacaggttgtggtgtgttctagcagtcctaagtaaacatgtggaaaatagaaaacagctctttgtagagcattgggtgaggtcgagtgacaggtcgagtagcagacaaaaaataaaacatagatactcgactgcacagtctgttgctagacaactgggtggtcgagtatgaggtcgagtaacaagaaagaattgcagaaattaagcaacagatgaccagatgtagtaaacaacagtagagtaaataaagaattcaatcagataaagaattcccgaggatggggtaattgagtagtttcgtttcctcaatttacaggtgattgacatgctcaataaattatccctagacaacgagttcattaaccaaatttaagtgccaccgcaacagagaccctcaagttaacctagtcccagactcaatcaccattgacgagagctaacctaacaggcattacgaatcaacaagttaaaaccaaaacgctccctgcaaccaataccttggtacagggccacgaatatctggaattagtggttcagacatttcatcgaacaccttttgggcgtggaaatgtctgggctcaaattctagttgattaa

SEQ ID NO: 194253 - DNA, 4807 bp, Arabidopsis thaliana landsberg
atgagcgctagtcgctcagtaagtccaggctcccctaaacatgcaatattccccacccaaaaacccaaaataacaatcaaatgcatgcaatcaacaaacaatcatgcaacagacaatcaatgcaacattcgagtatactcgattgagtatactcgacaagaaatcaaccaattacactttgaaaagtgtaatgaacacaatcaatactaagcatgcatgcataactaaactatccgagctcacacagtgttactactctaaaggcctttctcttttcagcaattctgatttcccacaaggcaatgtctccgatccttagccacaaaggctaaaaggatcacatctcttcccctttaccgtctacaagagaccaactcccttacggtataatttgtactgccccgtcgggtagcctcgattggtaacgagccagtccgagctattgggacaatcacgacatcgcttcaaaactagtcataaaaatgactaatgacgtttacttactacgagcctattgaatctcaataccactcgtaataagatctacctcacaacctaacctctcaattactacctagtatgcaaagctaattacaaacaagttaaccaagcaaatgcgaagataacaaacaacaaccaaacaatcaaactacaatcaatcaatgataactaacaagcaatcaatcattgcgaggtcatctagagcataacgttatcactaacgtgtagccaaacctcacatcaacgactagaaatgaaacgattataacttgcatgcatcccccgataaccttgcaatcataaccgttaccaaaatagtttagcacttgccccacacagacacaatgcaacctcctaggcatttctcacaactttgtataactacttaagtaagtagttaaaaactataagcaatccttcatagatctattcttatgttctacacttagctaatagaaccaatctaagagctaaactacacaacccaatcaatcaacaattctagatctatgaacggaaagtaaacaaacaacaatcaatctggtttacacgagttctaggaactacatgtaaccacatgcaacacacttaacccaaactcaccttggcctggatgaacgagcaaactctacccttgaccgcctatatctcgatccgacttaagctttctccaacgcgtactaacgatggatctaagccgcggaccgaaaaataaaacttaggaaactattctaaaaagaataaaagactaagggcggaactacttacctattacccgactaactcgactctcgactacccgaccaatgctcccgacgaccacggcttctccgagaagcttcacgacctaactagtataaatgtgattatttcgtggtttagagagcaaatggcgagctttgctatttattggggtgagaaaacgtggggagcaagtaacggaagcacgaggtggcggataaacgttatctgaaaccttatccttatccaaactcatgtctagccctatccaaactcatccttagggactctttgatcttatccttatcctaagcgtgtgccaacacacgcacaacacacgccaagcttgtgacggagctccttccaccacaagcacctccacgacatggccgcaaaatctcgaaaacgactatacggccaaatcggaaccatacaatcttccgatttattttacggccaaaattcaagtaaggtggcatgtcctcagccacttactctatttaaccgtttcaataaactttgataattgattaacacttcccttgatcaccactagtttgtcccagtccaagaaatatttttctcggcaaaatctagttttctccgatcaaaactggtcttcagcacttcctttaattttcttcggtagccttgatctttcccttgaccaaattgcctaaaataaaatccatccttaaaatcttcatttttatgggtaatggtttgatcgggtccttcgatcaaacgaacgataacttcctcgatagcatgtcaaccacattgccgtcatttcttgataattgttcgatcatgtcctctggatcgaactaccaatgtcctctatagcctaactgcccaatgccggtaataacggatccttaacatcctgactcttagcgatagccgataaatctgaactcactcgtgattgctcttgaaatcctttgataagcctcctttggtctatgatcacattaggcaatgctagtttacctcttataaaaattttctttacgaaagattttgaaagtcacggtcgcaaaggaaagtttactcgcaaaattgcgagagaagtacgagtattttgcggcgaacaatatacaccgtcgcaaatcttccgcagacacctcgcaaatctttacccttaaccctaaaatacataaaagtgttttgcgatattttattttcatttataaatgtgaatctaagtgaccatataatcacacaagtagagtatatggtaatgcacaaaaaatgttgtataggtttcaatattaacatttcattttgaaaaagttataaacattgattcaagttatagaaaaacataagatcatcattgatgtatttggggaaaatgcacattcgaaatatatgatgagaaagtagattctaatgtagataattaacttcctaatgattcaaaaaatgaatccgaatgattttgagtagtgtttttccaaattaaggttttgcgagggatttgcaagtcgttcgtagcatttccctcgtacttatttacactaaaccctaaattattaaaaatatttagtcatgtttttttgttgttgagggtcttacttgaaataggagaaaatgaatcagaaaatgaataagacatgattaacaatattaaaacatgtcttcgtgtttttttttaaaaccctaatgaagactttgcgagggaattactagggaccctcgcaattcccttacaatggttgcctcgttttaattggttgttttggttgttcctcgcaaaatcctagcaagtattgcgaaggatttgagacgtgtcaaatatctatatataggaataacctagtttgtgcggagctcaaacccagccgcacatcacgaaaaccctaatctctccgatctcttccttcgccgattctctctcttctccgatctcttccaatcgccgaatgtcttttcgattgtcttcctatctccgatctctcctctctgattcacttcacacacaccgattctctcctctttccgaagatttgaagatttgttgaaaggttaatttttctttcactccgattctctcttcaaaacgctgatttgttttactctagtctgatttcgtgttttaattccatttagggtttctttagggtttaatttagggtttgatttggggtttcaaccgatttagggtttagttttatgttttctttctctgttttttgaaagtttacgttttctttctctattactaatgtttttttcttttctcgtagatgtcttctgaaaacgactacactaggtatctatccactcaacatgtacttgttccttctgctcatgcttccagatctcaagggaatgcatctagaaactgtgatccaccctcacctaccagtcaaaaccaacaagccggtttctctcctccaccatccaattcaaacacgcctaatcaatctcattcagctactcaaccaccaactttgcgtctcaacgatctaacattggatgagctccttcgtaacaccccaaacccaacatcaattgtccaccctatttgttttgtcagaaagcaaagcccatggagcccatttaaacccacgtgaagcaactccctaatgttaaagggttctgttacgtgtgttgttggttgcacatatatataggtgaatctatctcccttttctatgagccgctaaaggaaaccaaataagaatgtttagaaagcaaatccaaagcatcaacacatgagttttatagtgtggtcgttaccatattggagagagaagagagttcacaagtgaaggaaaccaaagagattcatgccaccgttcctaaaccgagcgtcacggcgtcgtcttaatcttaaccctaattaaaggtcagccactatcgttgttgttgagtgtgttagtcattgtgaaacgcttttaaaggagaagaaaaaggaatagaaagagaagagatgaaatataatcgtgaggaagatgagagaaagcggagacgaaggacgatacgtggcggaggagaagagatcatcaccaccgcaaaggaaaggcattaagagatggagatttcgtttgtgacagtaaggagaaatgagatgaagcggatcctagtaaattagagaagggggctaggcaaaactagaatcatataaggaagaagatgaaaagaaaagagtagctttaagttgaggttatacaaggatgttttccgtcataccagagagaatcagttgttaaataaaacatctctgcaaagatcacgttgccatgaagccatatcaactgacagagtttcaatcggatttatattcgagaagttatacacgtttttttctggacaagtaactgcagaagctgtccaaatctgtgctaagtataaatccagaacagtgtgtgactactgggtttgtgatgcgtttttcagatgtaccagaaagaattatatcgatatcaagatgtctacggaaagatattgcttcaaggaactcagagtatctgacaccttgtgcatcggatttaagctccatccagaattgaccttagaagtttgcccggaatcatctcaagttgcagaaacctag

SEQ ID NO: 194254 - DNA, 115 bp, Arabidopsis thaliana landsberg
agagaaacaaaattcaccattttcaggtttctgcataaaacaaaagaaagaatttcagttaacagaggaagaacactacttccgagttaaagtccgagattctggaaccctataa

SEQ ID NO: 194255 - DNA, 423 bp, Arabidopsis thaliana landsberg
atgagaagtgctgaaaccaacaatcacaagcatgcatatgagagaaatcgcaaacaacacaaaaacctcgactggtaaggagatagtcacagtacaaagagaagtacaatgtgacgttgagacaaaattcaaactatcaaacgtgcttctagattgaaaacaacctaaatttgcgttagatgtaggcatagggactctagagaagtatccggtgagcaaacttcgctgaagattgacgggatccaaaccaacacatgtcgttctatatcggaagcaaaatgggtttgccggagaagtatccggtataagcagatggaacccggagaagtatccgatgaatcattgaatgtcgaaacaggcggaagacaacatgtaactaagggagagacaaaggtttaccgatatagttgtggacgcaaatga

SEQ ID NO: 194256 - DNA, 2648 bp, Arabidopsis thaliana landsberg
gcaaaatcttcagcttctaaatccacaagttctaagtcttcagctttaggatctgaaactcctttggagaatgcaaatgctccaagctctccaagtcagaaaactctacagaaatctcaggtaaatgtttccttagtatcttgaaattgtttctgtcatattgaatcagtctttggtttattaatgttatgaacatggcagtgtttcgatcaaggcgtttctaaggaaaatatgaagtgcaagttgatggatattaccggaaagaagcgtgttgtggcggaaggacgttgggcaacaaatgatccaaaacagaaggttcactttgttccattgggtgataatgcagttaaagtgtgggtagacattgttaaagttagcgacgtagaagtttggaggaaatcagatgaaatagagattatggaagatgccattgggacagttattgcttggcctgaggacaaagtgatcatggcatgaggtttggtttgtggaacttgttagttaaaattgttttcagacttttagtagcttttggatcttaatgagatgtttgtgaaacatgttaatgagatgattgtgttttgtgatttgtgttttggattagaaagtattaatgaaatgttgtgggattttataaaacaggtgcatgaatatacttgttatggcatttaaaaacctggtacgaaatcaattggttatcaaaatgtaagattaaacaaatgctattgtagatccatctactatagcgcaataagtaagtaattaatcaaaaatttaaaaatagacaaacgctacaagatactatatcatagcataaatattactatataaaaacataaactaaactggtttaacaaagctatcgtagagtcccctaacatagcatgggtaatgaattattatataatataataactaattaacacgaatcaagacacaacgtttccctgatgctataatataattaattaacatagcacacatatctgacgctatcttatatggggtacttacgataacaggggtataaaatagcgtttatgaaatcgctattaatgacgtaacatagcgtttctctcgtgataagaatgtggatttttcttgtagtgtgggtacgttaaaccttttagaacaatcttattcatatgtacattaccaacttccttattgatcatagttttttttaattgagttttatgaaattaaatatttttaaaataattttatattttcatgagaaccctattaagagaaactaccattggactatgattttttattttttttgaacataagttctaatctaacaaattcacataatttattcttaaaaaatggtgagagcccatccatgggctctcaccattggagatggccttaggtagcacagtttcatagttgccttgaaactagggtttcagggagtatcttcatcgaggagtctagttgtcatgcaagagtaggtgtctttgaactcttcataatcctcctcttctttagaacggtcgctgagttcatcatcccctcttgaacagtcttcaatccaattctccaaattctcgaagtgagaatagtcttcttgagtttcgtagctctcacttcaagaataagtctcggccattgaattttcttctaggcgtgccgctgcttcttcttctaagtgatatccttctttgatttgatcttgttgagaaacattagggatcgaaatccctagagtttttatagggtcaagatttcctttttcggaatagcaacatagatctttccctttttcactaggaatccaatttccttttttgtttccacctagtatcgggcttgggccttgggaaaatgttcttcttcttggtaagattggttacttctccactccgaaaactcgtttgagttagtgagcttcttctctagttcttcaatcttccaatctagatgaccttcaaccgaatcaatggcaaattcgacactgatgattcttgtgttgtggtcttggatatcgtcttgttggttaagaagggcgttgctgatcttgacaagcttttccttcatttgctagaattggtcgctgatatgtctataatttgcatgttttacacatccttttatcaccattttgagtctagtttcatctatctttcatagcattcaccatcattttcgtacatgttgcatctttagtcgagtctaggactagtcttgcatacattctgcattctagagttatttcaggtgttttggagctattggtgctcagaaagagggaaaacagaacagaaagtcacacttccaccaaacatactcgatcaccagtagcagagagggaagcagtcaggtcagcagtccatccagacacttctactcgatcacagaggagaccaggcagtccattctgccagatatactcgaccgcagaggagaggaggcagtcaattctacaattctactctatcgcagaggcaaccaggcagtccactttgccagtccaccagttatactcgatcgtagaggagaagaaccagtccatcttgacagctgacacacttactcgatcacagaggccaagaagcagcccagaccattttgtcaaccaaccaactcgactaccacctcgaccctctgatcaatccgcactcaaccagacaacctga

SEQ ID NO: 194257 - DNA, 84 bp, Arabidopsis thaliana landsberg
ctttccgacttcgttcggatctatctccgacttcttgtcggtttatcttcaaatcaacacttagatgttgttgaagctatttaa

SEQ ID NO: 194258 - DNA, 164 bp, Arabidopsis thaliana landsberg
acgattcagtggtgaaatctgcttctgagaaagcttttaaatcgcttcctgacatctccaaggctgtgaaagagctcactgtgcttaagggcgttggtgctgccaccgcatccgccgttcttgctgcttacgcccctgacattgcaccatttatgtccgacgag

SEQ ID NO: 194259 - DNA, 256 bp, Arabidopsis thaliana landsberg
gttacaacttaattctgctaatttacgggtaattgagcaaactacaacagacaaattgccaaaggtcatgaagaaagaaattacaaaccaacttctggcgataccacgtgccgcctctatttctccggtgattccgatggatcatcagattatgatgacgagtaatcatctccgatcccgtgttcttgctcacgtcccggtgatcagattggaggaatttgaatttgccaatcaaaactcattcaaaaatagttag

SEQ ID NO: 194260 - DNA, 30 bp, Arabidopsis thaliana landsberg
atggtggaacagcagcgtacaaagaaaaag

SEQ ID NO: 194261 - DNA, 300 bp, Arabidopsis thaliana landsberg
cggcagccttaccgctgcaggatcgacatccaggccagggagaaccggctggtgttcgacaccgcctgctcttgtccggtcggcgtggcttgcaagcatgccgccgccatgatcttgctggcggcgaacctgccgccgcaggcatggcctggcacaccgcagatacccctggtgacgcggcgccccgccgcagcggcgagccgtcggcccgacctgtccagatggccagcctggctgcaacgcctgaagacgcaggccgagaccgaccttgcggcgatcgagccggcgcgccagattggc

SEQ ID NO: 194262 - DNA, 89 bp, Arabidopsis thaliana landsberg
agaagtgaaaattgatgagaaaaccaaaagaaacccgttaagaagatccaaccgggaatgggcggcgaatggtcagaaagttaagaaag

SEQ ID NO: 194263 - DNA, 857 bp, Arabidopsis thaliana landsberg
ggatcggcaagagatggcgttggacggtgacgaaacagtcgtaggtggagattctcaaccaccggtgactactgcagcggcgactacagaggagaaggctatcgcgaggctgagtccgtttcctaacatggagcacatttctgataactacggagatctggaactggaatatagctctgccatgttaagctcgctagagaagtacttgccgacggaaatgctcacggcgactagagaagagaaggccaaattcatgtctgacattttgcgcaagtacatttcccgcgacgaatgttccaaagtaattgctctttcaattcgttttgatcccaattttgtttaatcgaattcggatttgattcatgttagtttctttctgtcctcaaattgatacgaattagagaacgatctttagcttcgtcttgtgaacatatctgcgaaattggaattgcttctgaagttcttgggatagtgattcttgttagcttctagaaattgcaggcactctgatacgatcatagaatggtctttagctttttcttgtgaaatcgtagaatctggttaggttctcagaatagtttcacgtttttataatgttacaggctaaatggtgcaagaactattggcagaagataaaatctaattatcaggtgagatgagatgcctttgctcgtgttttgttttgtttttcttaaatttcttcatgccaaagtttgaaatgtttccttttctgcagccactttctagggagttgtataattttgatcccgaattgtttctgcttccctctttccgaaaggcgatcagcgaaaacacaaaggaaagcttcagacgtatcatttctgaaccgtttcctg

SEQ ID NO: 194264 - DNA, 378 bp, Arabidopsis thaliana landsberg
atgcccttcgcttccatcgtcgacttcgtcgccctcgcggcgatctggggtgcctccttcctgttcatgcggctggccgtgggcgacttcggcgtcgtcggcaccgccgccgtgcgggtggcgatcgccaccgcgctgctggcgccgatcatgctggccaagggccacggcgccgtgttccgccgccattggtggaaggtgtgcctggtgggcatcctcaactccgccctgcccttcatgctgttcgcgttcgcgctgctgtcgatcacgaccggcctgtccgcgatcctcaatgccacggtgccgctgttcggcgcgctggtggcctgggtctggctgaaggaccgcccgagcggctcgcgcgtgctgggactgctg

SEQ ID NO: 194265 - DNA, 1089 bp, Arabidopsis thaliana landsberg
ggaaaaggagaagacaatgatagccaaacaggagagataatatacacaacaacttgctcaattggaagaacactgaagaaaaaagaagcaggtaaataatagccttacatttttacaccttctctatttctcttgttgtatgacagaatgtgaaatctcggggtgtaggatgacaaaatttcagcatattgaagaaaattctcgggctataacctggatgagtaaaagattaacttctcttcatttgactctaaaggtaaagaaacctcttacgatttttttaagtttgtctgaaagtatgtagtctatgactttgctatcttactagcttatcacttgtctacattcttttggaagcctatgactttgctatcttactagcttttccctttcatccagtcgctttcattgtcctttatgaatggttgtctaggtgtatatcaccattcaccaaagtatcttacatgcttattctgcttgttggtcactacatatagtttatcctcctatcgccttttggatcagtgttttttgtttcaaagtaaagacaaattgctaacaaaatagtgttaaaatttcagcagaccagtggctcacttcatagtgtatatggctcaattgtggttgttagcattgctcacattataggttggattgtttcccattttcttcacctggtagacagaaatatatagcacaatttgagtgagaaagaaattaaagtttgtgatttactaaattttgcaaagaagacgaaaggagctgattatggctgcattcttgttttgttagagcccttgtgactgtactagcaccaatctatgccgtcttatatggggtggttaaactggtaagtaagactgatcatgttttttaagtgttgaataccatttttaacacaaataacacaataaatgtgatttcaacagggaagatgcttgaaagttacttaaagagaagcaaattttcattaagttcatactcagaaaatatgcagtttcaggtatattattccactacagtcacaaaatttatcgtctcttttgttcatagctaatagacttctcaaaattctatagtgatgaacag

SEQ ID NO: 194266 - DNA, 83 bp, Arabidopsis thaliana landsberg
ccgaatccatccttcagatactactctctaatttcactacaatcatctcagccaaatgggttcggaagaagagaaggtcgttg

SEQ ID NO: 194267 - DNA, 190 bp, Arabidopsis thaliana landsberg
aaaatgggaaacacacgacaccgaacgggagcacgaacaaaaaaaaactagcaccaaaaccgacggaatggtcgatcacgaacacaccaggaaaaaaaccagcgggaccggcacccaggaacacggccaaaacaacggcaagaacaggaacaaaggaagcacccacaggggatgcggccaaagaggatga

SEQ ID NO: 194268 - DNA, 897 bp, Arabidopsis thaliana landsberg
atggcgttgtcttttataatgatggcatcgctcagcgcagtgatcggattacttgtctttctcttcgttgttgacccgagaaagaacattgaacggtaaacaaaacactcaagaattgtaccctgaattttaagagtaagaccaaagtttgatgaggttttctgcttgtaattgtagagaggactaatggctcataagatgaattcgaactccgtttggaatgattcattagcagctgcaaaatctgtcgtcaaagtaagtacctttcagataatcgtcgcgcaaggaatcattggttcgtttccgtggaccgcgatggttttctttacaatgtggtttgagcttattggtaaacggcatttttctacaaaaaacactttgaacatccattgtttgtcaagaactgagatcttgagtgtaaacagtcttttttttttttttttttaggcttcgatcataaccagactgcagctttgcttggggtatttgctacaggaggagcgataggaacattaatgggagggataatagcggataaaatgtcgcggatatatccgaattcgggtagagtgatgtgtgcgcagttcagtgcattcatgggaatcccattctctattattcttctgaaagtaatcccacaaagcacaagcagctactcaatcttctcgataactctcttcctgatgggtcttaccataacttggtgcggatcagcggttaatgcaccgatgtttgcagaagtggttcctccaaggcaccgtacaatgatctacgcgtttgaccgtgctttcgaagggtcattctcatcttttgctgcgcctttggtgggaattttgtctgagaaaatgtttgggtatgactcaagaggtattgatcctttgaaaggttcctctgttc

SEQ ID NO: 194269 - DNA, 78 bp, Arabidopsis thaliana landsberg
actatcaacgatgttgtgttcggaattacacaagcatctctttctcactatttgaaccgacaatatggtaaacaataa

SEQ ID NO: 194270 - DNA, 254 bp, Arabidopsis thaliana landsberg
  unsure (1)..(254): unsure at all n locations
atgcagatcaccctgcccgtcgccgacggcgccatccagccctacacgctcagcgcgccgaccccgtgggtcccgcccgagacgggcncgaagtcgcgtatcgcctacgcggccgcccacgtggtcgccgacccgatggccgacccggccgcgcccaccgcgtgcctggactgggacgcgacgctgcggctgcgcaggcacctgtggacctacgggctgcgagtcgccgaggcgatggacacggcgcacgcaac

SEQ ID NO: 194271 - DNA, 3376 bp, Arabidopsis thaliana landsberg
atgggggagttgagagggttgttaggatttcaaatcaagcaactccaggatggcaccttcatcagccaaacgatttatattcaagacattcttaagaagtttggaatgaaggatgccaagcccatcaagacaaccatgggaactaatgggcatctcgacctcaacacgataggtaaatccgtagatcaaaaggtataccgatcgatgataggatctttactctatttatgtgcatctcgaccggatattatgctttccgtatgcatgtgtgcaaggttccaagccgatcctaaggaagttcaccttagggctgtgaaaagaatcatgagatatttagtttatactcctaagtttggtctttggtacccccaagggatccacctttgatttaataggatattcagatgctgattgggcagggtgtaaaattgataggaagagcacatcaaggacttgtcagttcttgggaagatccctggtgtcctgggcttcaaagaagcaaaattcggtcgctctttccaccgccgaagccgagtacattgccgcaggacattgttgcgcgcaattgctttggatgaggcaaaccctgcgggactacggttacaaattaaccaaagtccctttgctatgtgataatgagagtgcaatcaaaatggccgacaatcccgtcgagcatagtcacactaaacacatagccattcggtatcattttcttagggatcaccaacaaaagggagatatcgagatttcatacattaacactaaagatcaattagccgatatctttaccaagcctcttgatgaacaaacttttaacaaacttaggcatgagctcaatattcttgattctaggaacttcttttgctaaattgcacacatagctcatttacatacctttgatcatatctctttcatatgctatgactaatgtgtttttcaagtctatttcaaaccaagtcataggtgtattgaaagggaattggagtcttcagcgaagacaaaggcttccactccgtaactcatccttcgccgtcgctccaagtcactctccattcttgggggagaaaaagctgagcatcaaagaaaaggaccttgtctttgggggagagagttagaacccaaaagcaaaaggaccggacttcatctttggtataatcttaactcatttatttataacccaaggggaaaatagcacttccagggctctaatgattccgtttttggcgatccatgccaaaaagggggagaaatgagcccaaagcaaaaggaccgcaccaccaccgaattcaaaaacttaagtattgaatattttcaatcagtatcctattgtgttcaaaagggggagaaaaatagtacttcaaaagtatatatcaaaaccctcttgaacactaagaggaggatctcttttagggggagttttgtttagtcaaaggaaaagcatttgaaacagggggagaaaatttcaaatcttgaaaatgcttcgcaaaatcttatccatttacctttgactatttgcaaaaggactttgaaaagaatttacaaaagaatttgcaaaaacaaaacatgtggtgcaagcgtggtccaaaatgttaaaaatgaagaaacaatccatgcatatattataagtatttatattggctcaaatccaagcaacctttacacttacattatgcaaactagctcaattatgcacttctatatttgctttggtttgtgttggcatcaatcaccaaaaagggggagattgaaagggaattaggcttacaccttttccctaaatgattttggtggttgaaacgaccaacacaaacatttggactaactaagtttgctctagattatagattacacaggtgccaaaggttcacactcagccaataaaaagatcaagttttggattcaacaaaggagctaagtgggaaccgaaggccctctggtctgggagcaccggactgtccggtggtgcaccggacagtgtacggtgctgccaggctggtgcgagcgaagtggccgctctcgggaattcaccggcgacgtacggctataattcaccggactgtccggtgtgcaccggactgtccggtgtgcaccggactgtccggtgagccaacggtcggccgggccaacggtcggccgcgcgatctgcgcgggacacgtggccgagccaacggctagaagggggcaccagactgttcggtgtgcaccggacatgttcggtgcgccaacggctcccaaatctgcaatggtcggctgcgctatttttggaaggaaatcgggcaccggacagtgtgcggtgtgcaccggactgtccggagcaccacgcgacataaggcaacagcaaccttcctagattgctctcaacggctcctagctgccttggggctataaaagggacccctaggcgcatggaggagtacaccaagcatttctacaacatttctaagcaccaagacatcgatttcacgcatttgattcattgtgaaagcatctagagctctagtggagttgtgaacttattgagtcgtgttgcgagctcttgttgcaacttgtgtgcgtgttgttgctatgattttgagttttgtgtgcgttgctcatccctccctcacgtcgtatttctctgtgaatctcaagtgtaagggcgagaggctccaagttgtggagattcctcgcgaacgggattgagaaaagaaaagcaagaacactgtggtattcaagttgatcattggatcacttgagaggagttgagtgcaactctcgtccgttgggacgccacaacgtggagtaggcaagttttgtacttggccgaaccacgggataaccactgtgtcatctctgtgattggattcttgtggttattgtgttttgactcctctctagccacttggccataattgtgctaacacttaacaagtttttgtggcttaagttttgaagttttacaggatcacctattcacccccccctctaggtgctctcacttatgcgttggcccgttctcccgcgcggccaacctcctcgtacgagagccctggaccttccttttataggcgtaaggagagggtccatgtgtacaatggggggtgtagcagtgtgctaacgtgtctagcacagaggagctagagccctaagtacatgccaacgtgcccgtcggagaggtgctagatccctgtgtacgcgataacgttgccgtcggagaagtgcatgagccctgtagaagcacagctgtcgatgctgctgggatcctgctgatgtctccttgcttccgtagggggctgagaaccaccgacgtcatggacgcatgtggggaaccatcattacctgttaccagggcgagccagatgggacgccggtcttgtttcctcgtagcctgagctag

SEQ ID NO: 194272 - DNA, 389 bp, Arabidopsis thaliana landsberg
gtagttgtaaaaacgttattgctgaagaagcagttcgcaagctagggttatcttttgagaagcaccctactctatactccatgacatggctgcaggatggagtttcatttcgtgtttctcatcgtttcctagtaccattctccataggagaattttacaaagatatgacttattttgatgtggctcctatgaacgttagccatttaattttgggaagaccatgggagtatgatcgcaaaatcattcatgatggtgctgccaacacttatgagttcctgtgggaaactcacaaaatcattctcctaccaactctggatattccattaggtccccaatcaccatcttctccgacatgcaaaccgacgctaccaccggttctcaaccgacag

SEQ ID NO: 194273 - DNA, 258 bp, Arabidopsis thaliana landsberg
ctaagcgaccttgatcctgaaccggaatccgagcaagaggtgatctctagatcggtacctgaaatatcggtgccggttccggtaacggagtcgatgtttattattacgccgcttgggaattcgattgttacttctaggagctcttcgccggaggaggaggaggaggagggtgagggtgagtatgttgctggtaaggatggaaagctttgggtgaattctccggcggaagctaaatcggagccccaacgatcgttgtga

SEQ ID NO: 194274 - DNA, 257 bp, Arabidopsis thaliana landsberg
atgactcttctcagctctcgcttaatcattcctacggacgcaactgcagccccgcgaaactgcatgcataaacccaaaaacgttacgtgtaagtcaagaaaacccaaatctgccttttccaaacatcagtaagattaatttaccttggccttgagattcaatgtgaggaacttattgagcgtgtgagatctaacagagaaagcatccatgtgaagattgctcagagtttccatgatgtccgcaactatgtagtctct

SEQ ID NO: 194275 - DNA, 107 bp, Arabidopsis thaliana landsberg
gtcctaagaggcttcattgagttgtttgattttctcttgagtacaacgacccaagtgatggcttctaagagcaaagcaatgcctccaagaacggcaatcactgcaat

SEQ ID NO: 194276 - DNA, 64 bp, Arabidopsis thaliana landsberg
atgatgtcttctagggtttgtttgctcagctttcctttacggctcgacaaagacggcggtacat

SEQ ID NO: 194277 - DNA, 342 bp, Arabidopsis thaliana landsberg
atgaatcatatgatagctcctttgttacttggattaagtgaagcttgcaaagataaccgtcttatatttagaaacgagcttgttaatggtcgtactcttagagtcacttgcgtttccagcgaaaaccgtcgagttgtcaaagatgtgaaacatcacgaggttttacgtattagttttgctgtgggtgcatccgtaaaaggttccattggaactgggactttgagcaatggtctaggtctaaaatgattactcattctcgtttcaggacatacactgcaatttttatgcctaaatgtgataagttacgcgtctatagtgccagacccgatggaatatacgtaa

SEQ ID NO: 194278 - DNA, 284 bp, Arabidopsis thaliana landsberg
gtctgaggaatgccttgccaacctttgtacgggcaatgagcaagaccttcgcggacctgatccgggataaggtggaaatttacgtcgatgacattgtggtcaagactagggaagggtcagttatagtggaagacctggccctgtttttcggcaagctgcgggcaacccgcaccaagctgaacccggagaaatgcatcttcggtgtctccacagggaagttactggggttcctggtttcataccggggcattgaagctaacccggagaaaatcaaggctattgag

SEQ ID NO: 194279 - DNA, 128 bp, Arabidopsis thaliana landsberg
aaaagaaaatggcgaccatcgaaattccgaaaagattccctaggttacggtccaaactcaagttaggacgtggaacatttgagatttgtaatgatttaccggccttgactgttaatagatatacatag

SEQ ID NO: 194280 - DNA, 196 bp, Arabidopsis thaliana landsberg
cggggaaacaccacacccttgttgacggagaggcacgacgactcactcctggatcacttgcgagaagactttgtcgacgttaagagcagaacggaacagaaaaccctagatctaaaaaccagaaatcgcctacaagcgagagagaaatacacggtttacgaggcaacaattgggcccgattttctcagtttgctag

SEQ ID NO: 194281 - DNA, 81 bp, Arabidopsis thaliana landsberg
ttagttctgaattctgatggtagtgatgacgatattgaatctgaatgcgacaatgatgatgaaattgggaagttgtgttaa

SEQ ID NO: 194282 - DNA, 89 bp, Arabidopsis thaliana landsberg
attcaccatcagcagattcaggatgatccaaaggagaagaagagaacgacgataaaccagaccgtcttgatcattcgtgaccgaatcaa

SEQ ID NO: 194283 - DNA, 654 bp, Arabidopsis thaliana landsberg
gtagtggcaaggatcaattgtatatgcgggaaagctgcagataatagtgaagtctctgagttgcttgaagtaagcagagttgtttatcatcaacctttaggatctcaattcaagggatttgcttcaagagtaattggtagttccgggactacgactcgtgatttggttttaaagcgccgttttcgcttagatgatctcgctgtttcactctctatgacattagagaagctttatatgtgggaaaagaagcttcacgcagaagttacagctgaagaaaagcttagggttgcttatgaaaaatcgtacaagattctgaacaatcttgatcaaaacggagcagaatctagtgagctttacgaggcggaaactttggttaaactccatttatctaaggttaatgtttcggttcgagcggttgaatcgatttcgatgagaattcataagataagagacgaagagctttcgtttcaagtgattgagatcattaacggattcaaaacaatgtggagattcttggcgaaatgtcaccataagcagtttcgagtgattgcgagaagcaagtcttgtgttcacattgttgaaaacggatcgagctccaggaaagccacgcagcaagtcgaaaaacagattagaagatacagagaatctttaaag

SEQ ID NO: 194284 - DNA, 280 bp, Arabidopsis thaliana landsberg
atgcagaactcaatcagggagatacagggaccgaatggtgttgtgctgcaaacaagtgaggaaattaaaggtgaggctgagcgtttttttcaggagtttctcaatcatcaaccaagtgattttcagggaatgacagttgaagagttgcaaaacttgatgtcctttagatgctctgcaacagatcagaatatgttgactagagaggtaacatccgaagaaattcaaaaagtcttgtttgcgatgccaagtaacaagtctccgggtcccgacggttacacaa

SEQ ID NO: 194285 - DNA, 138 bp, Arabidopsis thaliana landsberg
gctttagatcttggaagatgctcgaatccaacaggatatatggtagaagaaatatgggaagagctttctaaagcaaaatacatggagtgggaactggtttctgcaatgcggtcatgggaactgaatagtttgaagtag

SEQ ID NO: 194286 - DNA, 603 bp, Arabidopsis thaliana landsberg
atggaggggggaagcgccatgttgccctcggaggcgccgaacatggtgtctccggtgaggtgctgacgggtaatccgagtggacgcccgtgccccatttgttaggggtcggctagaggcccggagcgcgctccaaaagtacctgcgggtgatctgccggacccggtcccctttcgacggggtccgagggctcgatgcctccctctgatgggattccgttacaagatcgttcccgctggtctcagaaatgtcctagggtacctcgagagcgcagcccgagccttggttatgtatcgaacgtacccctggtcatccctcgctctgtgtctaaggcggctgtgaacccttcgagggccagcctacgaacccctgatcagtagtgggcgcggagcccgagtagcctgaggcggccgttgaacccttccgaggggccggccttcgaacctctgaccagtagtgggtgtagggcccacgcgatctgaggcggctgttgaacccctccgaggggccaaccttcgaacctctgatcagtagggaggctcggagcccggttccttcacggagaaggatccttttcgggtatccccctttcccggtccctgtt

SEQ ID NO: 194287 - DNA, 192 bp, Arabidopsis thaliana landsberg
tatactcctaaaatattgaaggaaaatgtatatccaaagccacgattacatcaacctcaaagtgggaaaactatggaaaatgagatggccacctctgttcagaagtcaacgtcatgtttttcggtcaagggttcctatcttttctcgacttcaggaggaaagatagcagtttttgatctaaagaattttgac

SEQ ID NO: 194288 - DNA, 349 bp, Arabidopsis thaliana landsberg
atgccaaggagtacgaggcataaatcgagtaagcataaagatgcgacgaaggagtattccgattcggagaaagagacgagtttgaaggagaagaagagtaaagaggagagtagtactactgttagggtttcgaaggaatctggttctggtgataagagaaaagagtattatgattctgttaatggtgagtattatgaggagtatacttcttcttcgtcgaagcgtaggaaagggaagagtggtgagagtggtagtgataggtggaatggtaaagatgatgataaaggtgagagttcgaagaagacgaaggtttcgagtgagaagagtaggaagagagatgagggagatg

SEQ ID NO: 194289 - DNA, 218 bp, Arabidopsis thaliana landsberg
aaacggacttaagcacgagattaagtagtaccagagagagatcggagatagctggatctggggagttcaaaattcggaggagattgagaacagaaacttcgattctagcacgagcctgtaacaacgagcttcgatttcagtcagaactacgagattcgacagtgaagaagactagtgattcgataaattcaaaattggaagcgaaacatacttcgtga

SEQ ID NO: 194290 - DNA, 107 bp, Arabidopsis thaliana landsberg
atggggttgcgatgtctacgagatgaaattggaataaggattcacgtgcgatacccgtgtcaagcgtttgaacgtactaaacatatgccaagaaatatggtaaattg

SEQ ID NO: 194291 - DNA, 252 bp, Arabidopsis thaliana landsberg
atgattcacgggctgccacttccggttcaagcaaatggtgtctatgaatccaggtggacatctttttttgaaagtgtgcgtaatttttttcaatttcagcgatgttccagagccctgtgatccggccttccagcgcctgatcgaactcgctggcaaagaacacgggtgccgtcttttcaagccccagacgatacaggctttgtcgaacatcggccacgcagctttcgatgttgtcggggcgaatgagagctg

SEQ ID NO: 194292 - DNA, 582 bp, Arabidopsis thaliana landsberg
atggcagtcgaggtcagtgagtcattgtatgccaaggcggtgacccctttctgttggcggggaatcgatggggatgattgatgtgtgtggggacagagtgactcgccacgtcgtgtgtttaggtttaccttgcaaggttaaaactcgatttgaatcgtctgcttctcgcagctaatgagactgcttgatccattgtactgcattgagtaagaagtggaatgaggtgacagtcaaaagatattgattgaaataatgtttgacaccatgtatgaatagctaggtactcatctagtctaaattactaatctagaacttgaaaagataaacttgattttagagtcagctagtgcttttggcaaccaaaccccacagccaaacagctgcatgtctagaggtagaggagtagactcctcacaccgggtaagtctagctgagtattagtatactcagccttgcttgtggcataattttacaggttctctggaggacatggttgctggagtgacttggccgtccatcttgccaccgggttggactgtcgagtgggaccctacctcggctgaggaggagcatgaggagtga

SEQ ID NO: 194293 - DNA, 213 bp, Arabidopsis thaliana landsberg
atcatctatcaacagggtctggtgcacaaacagcgacgacggaatccacggcagtcaccatctgaaaaaccttcattgtggcaaacattagcgcaattgcttgagctcagacatggtccattgaacaagttgctactcgtttcacacgtccgtgcctctaccctgaccggacccatcactacaagacattggttaaacgttattcgaacatga

SEQ ID NO: 194294 - DNA, 165 bp, Arabidopsis thaliana landsberg
ggttcttctgttcttcccattcggtttctcaatcaagaaactcattctcatgatatcttcaactctgattctacttttgtgacatcatcacgcgctgaaccaacgatgttgtcaagtagatgtcgtggccatcttccacgctcttaccctgatgatcttaccgag

SEQ ID NO: 194295 - DNA, 126 bp, Arabidopsis thaliana landsberg
atgaatttaggcgaagctgagtcgggccttgaacgacttcatcaatgtgctgaaaaagagctgctaccatacttagatgccaaaggtccaagtgaagatttaatgaattacgcacaaaactggcag

SEQ ID NO: 194296 - DNA, 204 bp, Arabidopsis thaliana landsberg
aattaagttctcaaacgactcgaagagattttcaaacacctgcgccaaaaccatgaatatcaaagcccgagaagatgaatgcatctaccacaaaggtaatgaaacgaaagatatatctgttgatgaagctccatttggtggcatacctcatccagacaaccagcatcttgacaagattggagatgtttatataaacaagaaatg

SEQ ID NO: 194297 - DNA, 130 bp, Arabidopsis thaliana landsberg
atgttggtgacgaagatatcacaagaagtagaggaagagacagaggtagtgaatataccgaggagtgtggtgtcggggaacgttgcagcgcgaaagggtaagcagcaaacgagttccgggaagggtggag

SEQ ID NO: 194298 - DNA, 292 bp, Arabidopsis thaliana landsberg
ctcctgcgggcccgggcctgggccctggtggccaccggcgcggtggcagagcccgtcgaggggctcgtcctcgacggcgagccctgccgggaggcgacggcgcaggtcggcgagctcgggctgctgcacgacgtcgcccggctcggccggcccaagctggtggccgaccgcgtcgccgaggtggcggccgacatggacgacgtgctgcccgccctcgtgctggcccacgtggtggcgctgcgtgaggacaaaaggcgaagggctcgaacgggtcgccgagcagttcgccggg

SEQ ID NO: 194299 - DNA, 479 bp, Arabidopsis thaliana landsberg
atggcgatcgcggcgatgcacgacgcacgcatcggcatcgcgatgatgctggcggtgaacctgtgcgccggcgccctgatcctgccgctgcgcctgtccgggttctttgccgcgctggccacgctggcgatgctgggcatctccttcttcggctggtcgctctccggccatgccggcgaccgcgacctgctggagagcgcgctgttcggcctcgcctatttcgccacgacggcgctgtgcagcgtgctcggccagcaattgcgtgccaccgaggcgctcgccgaacagcgcagcacggatctggccaacctgtcgcagatcaacgagctgatcatccgccgcatgaagaccggggtgctgctggtggacgacgccaaccgcatccaccagatcaacgaatccgcctggatgctgctgggcaaccccggcgccgaccagcgcgacctgggccagctggcaccggaactgtcgcgccgcct

SEQ ID NO: 194300 - DNA, 230 bp, Arabidopsis thaliana landsberg
aggttgatgataaccatgtaaagcaggttatgaagcatcttgatggtgatgatgcaatgaagaaggcgcacgtacgaggaagaagtggacaagagtttagcaaggaaacgacaaagatgatgatgaagaagacaacaaagaaagagacaaatgttgaggaagaggatgatctcgttgcctacactgctgattactggaaaccaaggcaccatcctcccaaaaacaactga

SEQ ID NO: 194301 - DNA, 601 bp, Arabidopsis thaliana landsberg
agcgagtgtgaccgccgtcactccaccgctccactggccagtctcacagatggacagcgccgcctgcgccactccgactgcagtgccactcgacagagtgagtctgacaggcaatcaggccttgccaaaggcgccacggcgaactccgctccgcccgaccccagggctcggactcgggctaagacccggaagacggcgaactccgctcctgccgaccccagggctcggactcgggctaagaccggaagacggcgaactccgctccgctcgacccagggctcggactcgggctaagtcccagaagacagcgaactccgctccgcccgacccccgaggctcggactccgccccggcctcagccgtcggtctccgcctcgcccaacccaggggctcggactcgacctcggccacggaagacagactcgacctcggcttcggaggagcttacacatcacccaacccagggtgcagaccagccacgtcaacaggaggcgccatcatcaccctaccccgagctgactcgggccacgggaacaagaccggcgtcccatctagctcgctccgccagataagcaatgatggcgcctcgcgtgctctgtga

SEQ ID NO: 194302 - DNA, 120 bp, Arabidopsis thaliana landsberg
ggtttgaatggtggttacacaggcgatgtcttcatgccgctcaaccatgtgaaggtgttgcatatacttggttttcaaggaactagtctagaattgaaacactttaaatggtgcaagtga

SEQ ID NO: 194303 - DNA, 313 bp, Arabidopsis thaliana landsberg
atggagccatctcaacgcaacaccaaaccgccgtcgttttcagattccactatcccggttgattccgatggtcgagccaccgtcttccgaccattctctctctcctcgccacactcacgagcctttcacctagcttggctctcactcttctcatgcttcttctccaccttctccatccctcctctggtccccgtcatctcctccgacctcaacctctctgcctccaccgtatccgccgccggaatcgcttccttcgctggctccatcttctctcgcctcgctatgggaccactctgtgatctcatcggaccac

SEQ ID NO: 194304 - DNA, 248 bp, Arabidopsis thaliana landsberg
atgttcgtcggagattccaactcatgttatctccaaaacaatttgcgacacttacggtaagaacaaatttactttgtaaattcatctttggttatcacagtaaatcaatcttttgaaattctagaatttctgaacttgaatttgacgatgacagagctgtaccattaattagtcgtcacactaatccaaattgcttaaccggtaccaaattatttaaccgaagtccggtattcggcgatgcggtctag

SEQ ID NO: 194305 - DNA, 420 bp, Arabidopsis thaliana landsberg
atgcgcgaccgcggcggcgacgagttctttcaactctactggttcgacctcgccacccatcgcgagacgctcctgaccgacggcgcctcgcgcaacggcccgccgctctggacgcatcgcggtgatcgcttcgtccacaccagcacgcgccgcaacggccgcgacaccgatctctacgtcgtcaacctcaagcatctcggtgaatcacaacgcctgctccagctcaccgggtcgtggagcgtcctcgattggtcgccggacgacacccgtctcctcctccgcgaattccgctccggcagcgattcgcggctctacgtgctcgatctccgcgccagctccctcatcgcgctcaatcccaagccgcccgacgccgaaaccatttcctacggccgggccgtgtgggcgcacgacggccagggc

SEQ ID NO: 194306 - DNA, 583 bp, Arabidopsis thaliana landsberg
  unsure (1)..(583): unsure at all n locations
tatatatacctaagccctgaagaccacgaaaggattggatcatctgtcattgcccatgaagtaaagctccctagtggggaaactaggtgggtgattgatacgatcgttggcaaagaagatggtattggtgtagagaacttaacaggaagtggggccatagcgggtgcttactcaaaggcatacaatgaaacttttactttaacctttgttagtggaagaacggttggaattggtgcttatcttgcccgcctaggtatgcggtgcatacagagacttgatcagccgatcatcttgactggcttctctacactcaacaagttacttgggcgtgaggtctatagctctcacatgcaactgggtggcccgaaaatcatgggcacaaatggtgttgttcatcttacagtctcagatgatcttgaaggcgtatnnnnnnnnnnnnnnnnnctgagctacattcctgcttacgtgggtggtcctcttcctgttcttgcccctttagatccaccggagagaattgtggagtatgtcccagagaactcttgcgacccacgagcggctatagctggggtcaaagacaataccg

SEQ ID NO: 194307 - DNA, 741 bp, Arabidopsis thaliana landsberg
atgggtcgatgaaaggtcaccatgctgctggtgatttgaatcttgaggcagctgaaaagaaggttgtggaagcaatgagtgaagagaacgatatgccaattgcttgggaaccttatctggtggaagaaacgcgtaacgagaaggtagcatatattgcgtgcggttccgatcactccttgatcctttgtcgtaagtaaatgagaccgttttacactatgggagagtatatattaaacaaaaagaggattagttttgtctgataggttttggcttatttcagatgatggcacacttttgagcgctgggagcaacatctatggtcagttgggtcggtctaaacaagatctaggaataaaacctgttgatataactgaatctccgatctctatagcagctggtcttggtcattcactagctatctgcaacaggggtgaaagaaatattctctcatggggttggaaccgaagccggcagcttggtaggggaaaaccggaaaacctgccaagagaagtagaaggtttcgatggggaaagtccagcttcagtatcagcagggcgtgtgcattccttgtgtgtaacagagaaaggagaagcttgggtttggggttgtgggaagaatggtaggctcggtttaggaagctcgagcgatgagcctgaaccgatgttgttagaggatgtagagggctgtgttcttcaagcagtcgctggctttgatcacagcctgatcttagtggctgaatag

SEQ ID NO: 194308 - DNA, 505 bp, Arabidopsis thaliana landsberg
atgaaagatctccactctgctgggtaagtaacccatctcattttaatggatccatcaaacattgaaaacattttatgacaaagcaataataggatgtttggaaaagaaaaatcaacgcaccacactgattttcgctttttcttatcaaattatactctagtattctttttatttttgttaaaatataaatacaacattatttactataaaatctgaaatctaactaaaagcaaaaaaaaagtaatatatctatagttttatgtatgagcatgtgatagttttaatcaatatacctttagggattctgaatatcaaactaataaatcatgaaaagaatatcatttcgtttatgttaaaggggttctgaaaagaataccattttagatatttttcaaaactccttaaaagcttacttatgcaccacggcttatgcagggctaccacagtacaagctaaatattgggccaatgacgagagggtacgtgaagctcttcaaataagaaag

SEQ ID NO: 194309 - DNA, 227 bp, Arabidopsis thaliana landsberg
aaatctttgcagagatttgagaatgaagttgaagaaaagaagtggattccgttgctaattatcatagcattaagctgttgtatctttaacatgagcctcgattgctttttatcggtgagaaaataaaaagatccatgttcgatgagactatcgacggtgattctttcaccggaatcggtgcccggactgcaaggatgaaatcggttcgctttagagtactcatctga

SEQ ID NO: 194310 - DNA, 566 bp, Arabidopsis thaliana landsberg
ttatacaagatacgtggcagggaaataattctcgaaaattcaaatctgttgtagagagggctgctgattgtaaacaagccatcggagtttggaagaataaaatctggtctaattcagagattcgaatcaagaggcttcgaaaggaactggctgctcaggatgcatctttgactccttgttttcaaaggattagtgtgataaagcgagagttagcaattgcatttagagaagaagaggttttttggagacaaaagagtcaagaaaaatggcttaatgatggcgacagaaatacaaaaaatttccaagcctctgttaaagctgatggagtgaaaaattcactacaatttctggtggatgacaatggtatagatcagttttcagattgcaaaaaaggagagattgctgtaaaatatttctctgatctatttaaatctgtccacacaaaccaggttagtgtttttcttcataacttccaacctagagtaacagagactatgaatcaagatctcgctaaaccgatttcccctactgagattcggcaagctgccttttccattagtagttag

SEQ ID NO: 194311 - DNA, 1245 bp, Arabidopsis thaliana landsberg
atggctattcagttacatcatgtgatatccggtcccgttgttaacttctcggcttacggggatttcaatggtttccctcgtcgggttcgagaaggttgtcaaagaagcggtgtgaagcttattgatgtaccaaatggtaggaaagatgcgtcggataaagcgattttgattgatatgttcttgtttgtgcttgataataagacgcctgagactatcgttctcgtatcgggtgatgttgatttcgcgcatgcgcttcatatattgggtcagcgtgggtatactgtgattcttgttataccttgtagtgtgtatgtgaattcagctttgtctaatgctggtaagtttgtttgggattggcatagtattgttcacggtaagagatatgtgccgcgatgtaaacctcgtgttgttccgtatcttatgggatgtaatattggtgataacagtaacatggatgggttgaatgaagatgaaactattctctatagaggtaactgttatagtagtgatccaagagagtcttcttccttgatggtttcgcagtttcgtaatgagtatagtagcggtgtaatgtcgtgttggccatctaattcaggcgagtctttggcatgtcctccttcaggtcaccttgagtccaccatgtgggtagcgccgggagatttaaacggtttgaaggggcagctcgtgaagctgctagagctttcaggtggatgtattcctcttatgcgtgttccttctgaataccaaaggaatttcagtaaaccgctttttgtatcggattatggggtggccaagcttgtggatctgttcaaaaagatgagtgatgtgattgtagttgatggtaaaggcaacaagagatttgtttacctgcgcagctcgaaaccgaacatcatctctccttcttcccctgtggttctactgagaagagagaggaaaggaaaagagcctaacggggtaactaccaatggaggagtctcctctgatgaaatgtcagacatgggctcggttcagagcgagaggaacctagaagagttcaaattcgagttacaagacattttggtgagctattgttgtcatgtgcagatggattgtttcgaggcgatatacaagctaaggtacaaaaagccattggcctacacaaatatgggcgtgaatcacttggagcagctctttgataagttaaaggatgttgttgccatatatgaagatcccgctacagggaggaagctcatcagcccggtttag

SEQ ID NO: 194312 - DNA, 360 bp, Arabidopsis thaliana landsberg
cattgcaaatggatctcaccctcaaatgctaccactgaggtgggcactgttacccaggcattctgctcggagctccaggaggagctctctgattattacaagctgctggctgtactggaatcgtactcattgaatccaattcccacacctggatctgattcaggtgtgtccagtaattacatctcactgcaccgtcttgcagtgtggcttgctgagcctgcagtgagaatgcgcctaatggctgtactggttgatggatgccggggactgaggggtggtgctatggctggtgtgatccatgggcacgcacaacacagagatcctatgtttcaggagtttatgtgccgattactgtgccgg

SEQ ID NO: 194313 - DNA, 70 bp, Arabidopsis thaliana landsberg
atgcaggaaatagaaattcaaaaagaaacagtaaaacactcgaccaacacagctcgttgccaagtactgg

SEQ ID NO: 194314 - DNA, 414 bp, Arabidopsis thaliana landsberg
aaatcaaagaaaccaaaatatgtaaaagctcctgcaccaagtggtgcatggcccatcattggtcatctccaccttctcggtggcaaggaacagcttctttaccgaaccttaggaaaaatggctgaccactacggtccagccatgtcgctacgacttgggagcagtgaaacatttgttgggagcagttttgaggtggctaaagattgttttactgtgaacgacaaagccttggcttcacgtcctatgactgcagctgcaaagcacatgggttacaattttgctgttttcgggtttgccccttatagcgctttctggcgtgagatgcgtaaaatcgcaaccatcgagcttctttctaaccggcggcttcagatgctcaagcatgtccgtgtttctgagatctcaatgggtaattaa

SEQ ID NO: 194315 - DNA, 289 bp, Arabidopsis thaliana landsberg
atggtctcatcgtcttcatcattgttatctccatcttcatatacagagttaaaagatgcttggcatccatcaacaacagcgaacacaacagaatcaagctactggtttaattggagggttatgatctgctgcatatggatggctatagcgactgtgatcacagcttttcttatattcaaatacgaaggttttcgtcggaaaccaagtgacgttggtgaagttgacgcaggagagaaagagtggtcgggaaatgtatatgaagacgagcacatggaggcctccgtccttc

SEQ ID NO: 194316 - DNA, 154 bp, Arabidopsis thaliana landsberg
agatctcaagaagccgatccggaggctttttgtaaaaaaacgaacggaacagcgccatgggatggcgctgtctctcctccgatcagatccaaaccgtcgatttagtaaaccaacaagcagatcattctcgattgctccaattccgttgacctaa

SEQ ID NO: 194317 - DNA, 766 bp, Arabidopsis thaliana landsberg
atggtgagtcacagaagaaatacaataaaacaggaaaacctcaaattaaagtactggaattattacataaatcggagtttttcaagtagctgatataagttcataaaataaactgcagcggataatcgatatcgtcgaaagcgaggaatagggcaaggcctagcccactactcttcctgctcctctcctaccggagcagcatcccactcgaccgtccaacccggtggcagggtggtaggccaagtcacaccatcaactatatcctgaagcgtacctgcaaaaattatgccacaagcaaggctgagtatactaatactcagctagacttacctggtgtgaggaatctattcctctacctctagaccatgcaactatttggctgacgggtttggtttgccaaaagcactagctgtctctaaaatcaatttttagccttttaagttctatcatcattaacttagctaggtttgctccttctaagcatacatggtaacaatcaattagttcaatcaacaaattatctcatatagtccacatttcacttcttactcgatgcagtacaaggaatcaagcagtctcattagctgcgagaagcagacgattcaaatcgacttttaaaccttgcaaggtaaacctaaacacacgacatgtcagggtactccgaccctgcacatgacaaccgtccccatcgattccccgttcgtgtctaggcctcaccgccttggcatacaatgctccactgaccccggctgccaccgtgcagtga

SEQ ID NO: 194318 - DNA, 418 bp, Arabidopsis thaliana landsberg
atggtgcatgctgacgtggcgtctctctccataacaccttgcttcccgtcttctttgtcttcgtcctcacatcatcactataaccaacaacaacattgtatcatgtcggaagatcaacaccattcgatggatcagaccacttcatcggactacttttctttaaatatcgacaatgttcaccatctccgtagctactacacaagtcatggagaagaagacatgaaccctaatctaagtgattacagtaattgcaacaagaaagacacaacagtctatagaagctgtggacactcgtcaaaagcttcggtgtctagaggacattggagaccagctgaagatactaagctcaaagaactagtcgccgtctacggtccacaaaactggaacctcatatctgagaagctccaaggaagatccg

SEQ ID NO: 194319 - DNA, 76 bp, Arabidopsis thaliana landsberg
ctctcgtgtctgcaagaaagctattctgagaagaatgagtacgaatcctgcaattgaaccaaaagttcgcaaatag

SEQ ID NO: 194320 - DNA, 81 bp, Arabidopsis thaliana landsberg
atcctccgaagaaaaatagaaatgaaagatggtttcttttgttttcgttttgcagaagaagaagaagaagaagatgaatga

SEQ ID NO: 194321 - DNA, 216 bp, Arabidopsis thaliana landsberg
gggagccggctcttatgctccggtgaacggcgtccggtgctatagcggtcctaaggtagcgaaattccttgtcgggtatgtttcgaaccgcacgaaaggcgtaacgatctcactgtctagcccgtatacaggtgcgcgtacaatagacatgtctgtgaagagcgttgtaactatccgctgaacggaagtgtcttatgcagctacggcgctgcctga

SEQ ID NO: 194322 - DNA, 150 bp, Arabidopsis thaliana landsberg
attgaaaatgttcgttccgataacactacttgcttttggagttttggttcctgtcaattggactggagaaactctagaaaatatcgatgacttgacattcagtaacgtcgataagctgtcaatatcaaatgttccaccaggatcgccgag

SEQ ID NO: 194323 - DNA, 328 bp, Arabidopsis thaliana landsberg
ccacggggcagggtccggcagcgatttcggaagcagctctgattacaacaagtacctcgtccaaatccctccgacgccggacaacaatcccggtccggcgtcgctttcaatcgttctcctggaaatcgattccaatcaggagtcggttccgtccgtttccggagacatcgtttccggttcatctggtaaagacaacgaaccggatctaaccgatgtgagaatcaatgtaggtgaagaagaagaagacgataccttgctttccaagatatcttattctcttactcgtgtcgtcaaaatctctccgatcatcatcgctctttatcggtaa

SEQ ID NO: 194324 - DNA, 340 bp, Arabidopsis thaliana landsberg
tatgcaggggccggtgcagccgggattgcacttatcgcagcaggatgtaaaaaaagagacagggggtttcctgaatatgatggtgttgtattagattttaaagatgattttggtgtattgaattatgcttatgcactggagcaactggaagcggcattttatatccaggtggcatccaatccaccagcgggttttagcgctgcggaaaaagcttattttcaggacatccagtttcatgaaattgcgcacagggaatatttaaaaaaggctttaggtacagctgctatcggaagtcatgaggttaattttgaaagtatcaaatttgacgaccgggacaatg

SEQ ID NO: 194325 - DNA, 152 bp, Arabidopsis thaliana landsberg
ggaatctggaggttaagttgctgccggaatctgccgttgtggaaaccgggaaaaagaaggagacacacgtcgtcatcatgaaactaaaagcgtctccgtcgccgtcgtccatcaccgatgcgattaaggcgcgaagaccatcgatagatctg

SEQ ID NO: 194326 - DNA, 303 bp, Arabidopsis thaliana landsberg
atgcagcgggattgcgtcaccgccgaggacgttgcgaacgttggccgctggtgacgcacttcgtcgcgtgcaagccgtgtgggggcagtacgcgagctacgaagcatcgcggtccggaccgacatggagcgcgcgctcaacttcgccgacgaccaaattctcaggctgtacgggttcgagcacgagtcgctcaacaccatcggccgtgcggcgcgtgcggaacgacaccggagggccgctggacgcggacgacgtggagatcggccggctcttgcacccgacgttcagggctgctgggccctg

SEQ ID NO: 194327 - DNA, 87 bp, Arabidopsis thaliana landsberg
aacaagaaaaagaaaaagagcacactaaatgtggagagggtgagcttgaggatattataaattgtggggttgaaaagaagaaagtgg

SEQ ID NO: 194328 - DNA, 123 bp, Arabidopsis thaliana landsberg
agcaacggtatcggtgatcacttataacggatatttccaggagtatacgctaagtatcaataacaagaatgagtctctatggacactggaacgtgaattcaatctcttctccataaccaccgg

SEQ ID NO: 194329 - DNA, 297 bp, Arabidopsis thaliana landsberg
atgatgacgaaaagcttcatcctccggtgagaatctccggtggaactgcttcgtttccttatactaacaaccaaggacaacgctctgcgttacggatctcgaggattgtttctgacacgctgcgtttaggtccgaagaatgttaggtggtttgtgatgggtgatgatgatacggtgtttgttactgataatttgattagggtgttgaggaagtatgaccatgagcagatgtattacattgggagcttgtcggactctcatttacacaacatatttttctcgtatggtatagattatg

SEQ ID NO: 194330 - DNA, 294 bp, Arabidopsis thaliana landsberg
atgatcgaatacttcttgcactttattggtcacgtacgtatatttttcatttttatatttccaaatcttcctttctctctttttgcttttctccaaatgatacgaaagtacacattaatttagtactattacttttgcattttaaggttattaatgcatcatctcgctttttcttaactaggcaatcaaaatttattcggtataaccccataattaatctctaattcttcttttcacttattgtagtggtttaagaagaagcacaagaaagctttatctgaagctcttgaaaag

SEQ ID NO: 194331 - DNA, 866 bp, Arabidopsis thaliana landsberg
atggtccattccggaacaaactatgtccctcacatcatgtacgtagataacctagccgaagatctaacaaaaaaaatctagccaagtccggattcattcctctagttcaagattggactcgcttccgagttccgaccacacatcttgagagagagtatagctctttgtatgtatcctctttctcattcaattgaatttatatatacacaagagaaaaactctttacaataagtcacattattgttttttcttagtttcatccttaaatattcaccctctacataattcatccaaatatgtgcatagaaataaggtcttagagtataaattttaaatattaaacaaggccataatatttgtgagccggccttgtttttgacgattgagattgacgtttgagctagtcattggagattgctatattacaactaagaatttgagaaaaaaagtcgaaaaactaagaaattgaaaccaaattacattaggagtaatggtagggacagtaaatctacacttttggtcggcagcatgtgactcttttatacagtggccgctgctcaacataccaaaccccaattactataaatacctcactgagtctttccatttttattcatcaagtacttaaacacaatggtttctctcaaagctttctcaactgtgttttttcttatactcggcgttagcatttgctacgccactagccgcaatcttttgaactacggccaagcttctggcggtggaggacatggtggtggtggaggttctggaggagtgagtagtggaggttatggaggagagagtggtggtggttatggcggcggtagtggagaaggagctggtggaggatatggaggtgctgaagg

SEQ ID NO: 194332 - DNA, 359 bp, Arabidopsis thaliana landsberg
gggaagaagaacgtttcaagcttctcaatctctatctcaacaaatatctaaagatgggtgataacaacgaagacacaaaaccgaaatggagtcatttgtttaagaagctgtcacagaagattaccgttgaagaagacttaactgataaagtgatttctgaggctgcaaagaagacagaaggattctctggccgtgagattgcaaagcttgtggctggagtacaagctggagtgtacggacgagcggattgtgttttggattcacagctttttaaagagattgttgaatataaggttgaagaacatcaccgaaggcatatgcttgcttctgaaggttttcagccattactcttctcttag

SEQ ID NO: 194333 - DNA, 468 bp, Arabidopsis thaliana landsberg
gattcatcagcttggactgtggattaacccctaaccagtctccgtatatcgaaccaacaacaaaattaaatttctcgtctgacgctggttttatcaaaagtggaaagcctggtagaatcgtggatcaatgggatacctataaacagtataatgctttgagatatttcccagatggaacgcgaaactgttataatctaaaagtcaaccaagggatcaactatctaataagagctgggtttgtctatggaaactatgatggccttaatagacatccaagatttgatgtatatcttggggttaatttgtggttatcgatggatgcatacggcgcacaagacaatgagattattcacatggcaaagtcaaactccttgcaaatttgccttgtcaagacaggaacaactacacctttcatatcaactttggaactacgacctttaagaaatgatacttattctacacaatcag

SEQ ID NO: 194334 - DNA, 61 bp, Arabidopsis thaliana landsberg
atggtgcatggtgctgcggaggtcactggcatgaatgctgtcagagtccgcgaaaccgaag

SEQ ID NO: 194335 - DNA, 1478 bp, Arabidopsis thaliana landsberg
atgggcatcacttctcgtccatggtatcaaacgcatcgaaagcagatcctggccttccccaattcgaggtaaaaaaaccctaattttgaactcagggattcgactgagatttaatttgaatttgaaacattgtgataattgcataactttgaagaagaagatgatgttgtttttaaacatgtaaataggccgtttatggattcatgctgcaagtaaagtacctgatgaagctactatcaaagcaatggaagagttttaccaacaaatttatgctgttgatgggatcactgatattcaattcccccaacattaccctgtttcaagactaattggtatcgttgtttactaatctccatatttgaaagtctaagttccatgttatagtataagtaagacctgattttgcttggaacatatttgaatacggtttcgttggtataggatgtgttgaggttgttggatgtgtcacctccgatgagcttcagaactgggatgctttacctcaaggggtacaacaattttccttattactgtgttctattctttgacattgaaaacagctcgttatcgatgattctttagtataataagcaaaaacctcaactgttgtcacgtatgtaatagtgaggcttgaagacaaactaacttttgttggctatgtgagaagccacagttgaaagtcacttcatcttgtggctgatactgcattgtatagattgacttatttgacatttgattctgtgaactcttccagaaactgattattccatttgagatgcgtgggtaccagggcgtctataacttagagaataaggtaatcttgctgttcttcaaagcctagggattggtgggttcttgttgtagtataaattagtaccagttacttactgtatttctaaatgaaacagatttatgtagcagcagctagaggtcttatgccttctcaaaactcttttaaggtgaaattccctcttcctgacccaaaagacccgttttccttaaaacctggttctattccttgtacaatgcaagagaagaaagaacttgattcaaagcaagttaccagcctcacagctgcaatcaagcaagttaccagcctcacagctgcaatcgccggtgcaaaagcagcggcgacacaattttctaagaagggacaaagtctccaaacaaataatatatttgattacacaacaagaagcaagagcaaagttattgaagatgaagcagcagaatccctagataacccggttcttggttctggtggaacgtctgaccgtacttatagaacaagaagcaagaacagaggcacacagatgggtgaagaagtatgtagtgaaagcagcagcagcagcagcaaagttgaatctagtcaaagaagtgcagtcacaaagagtgaggacaggaatacaagaattggtgaaagaaggtttgatcctggatctgcccgggtacgtttattatcttacattaagcgataa

SEQ ID NO: 194336 - DNA, 172 bp, Arabidopsis thaliana landsberg
atggaacttgtgttcaattgtcaaaactacgccgaggttaaccgcgtgaaggtcgccgcaaccgaattctttgactatgatcttagttggtgggatcaaatcgtcactacaaggtggcgtaatggagagtatcctattgatacatgggaagggttgaagcttctcatgaggc

SEQ ID NO: 194337 - DNA, 410 bp, Arabidopsis thaliana landsberg
  unsure (1)..(410): unsure at all n locations
atggcgtccctaggccagtanggcgtccaggcggccgtagtttctgggcgtcgagctcgccgcgccttgggtgcgtatggcgtcgcctaggcgtccaattttaagatcgcgcgcgtagttgtgtacaagaaagggttttagggtttcatgtcctgcgcgccgcctctcctccaacaggcgcgccgccgctcctccatccggtgcgccgcgccgcctcctcctccatccagcggccggctcctccatccggcggcactctgctccatccggtgcgccactctgatgtctgctcttcctctgctctcctcttcctctgctctcctcttcctctgcttcctcagctgctgactgctctgctgctgctcgcttcctcttcctctgcggctctgcttcctcagttcatctgctga

SEQ ID NO: 194338 - DNA, 421 bp, Arabidopsis thaliana landsberg
atggggatggagagtagaacctgtgcctctcgcggcatctctttctgctcaatcctattccactctctctggacaactattatcggaatcctcttcttccgtctcgcaaccaccaatggccacaagtccggttccatccacttctttgccatttgcggaacagtactcattaccttaccttggatcatccaacttctcatctccacgaccgtaatacttctgcacaagaccaaaggttacaacttcatgtggattgttcagtcaccaaaatccaaagagaatcatcatcacacgattgtcgcaacaactactaccactgcttcttcttgttcatctcctctttcgtctctccaggttctgaagaaaggtgatgtagatgagtacgagattaggattgtgattggtgctgatggtcctaaaa

SEQ ID NO: 194339 - DNA, 332 bp, Arabidopsis thaliana landsberg
gcgttctcggctcgacccgtcatgccgatgctctctatgtggcactcgatccggccgtgcctggatccgtggtcacgctgcgcacgcgggcgagcgaggaagccgaccaccgccgatccgagacgccgcctgtcgctctggtcgacagtcgctggcagctttcgggcttatcgcgtagcgactgcggctttgagatggcggcgcagggatacggccggggcgccatgacctggcaagcaccgccacggagaacataccgcgtagacgcatcgcgtaacggttcggttctctatgaggtcacgcaagccgccgacgagggcggcatacttcga

SEQ ID NO: 194340 - DNA, 315 bp, Arabidopsis thaliana landsberg
atggaaagaattcctcttgccacatctgagggttttcctcatgtgctttcacgcaaaaatggtgaaaaaggcaaaaggagatttgtctctggggatggtgaagagacgacattgattcccggaaccagcgttgaagaggcttacaacaagctaatagttgaacttgaaaaaagtgttcctacattggttggcattgaatgtcccaaggatgagaaacttcctcgtcgcaaaatttttgacaaacctaagacgcgctgcttcactattctacctatggagattaatcttgtgcgcccgcacatgttgttcaatttt

SEQ ID NO: 194341 - DNA, 298 bp, Arabidopsis thaliana landsberg
agtcttttacgcaccaaaatggcgtcgttccgagctttgacccgtcgtattcgtctccacttctggtcaagaaggatcaacgcacgtcagtcgtcgcgacggagtttggaaatatatcagccgttcagatcggtgatggataccatattcagttcataacattggagccaaacgcacttttgcttccacttcttctccattccgacatggttttctttgttcacactggtacgtcaaaacactcatctacttttgtgttttctaaaaaattattgatcggaccaaagaatcttaagcc

SEQ ID NO: 194342 - DNA, 591 bp, Arabidopsis thaliana landsberg
atggtggctcatgagaagaatgtaagctttgaagagtgtttggagctgatggagaagatgaggcaaatagaggatcatcctgatattggcatttacaatgtcgtcatcagattggcttgtaagttgggagaagtaaaggaagctgttagattatggaacgaaatggaagaaaacggtttgagtcctggagtagatacgtttgtcataatgatcaatggattagcaagccaaggttgtttactcgaagcgagtgatcacttcaaagaaatggtaactcgaggactgttctctgtttctcaatatggaactctgaagttattgctaaataccgttttaaaagacaagaagcttgaaatggcgaaagatgtttggagttgtatcacaagtaaaggtgcttgcgagctgaatgtatcatcttggacaatatggatacatgccttgttctcaaaaggctatgaaaaggaagcgtgttcttattgtattgaaatgatagagatggacttcatgccacaaccagacacatttgctaaacttatgaagggtttgaagaaattgtataatagagaatttgctggagagattacagagaag

SEQ ID NO: 194343 - DNA, 138 bp, Arabidopsis thaliana landsberg
tttcttcgcagtgacataccaagtcgaatctacaacttcttcaaaagtttgccgctgaccaaggcagagctagactttccaagtgaaatcaacaacttcttcacaatgcctccgaccatcgaagagcacatgtcctga

SEQ ID NO: 194344 - DNA, 477 bp, Arabidopsis thaliana landsberg
tttgagaacattaagaagttaattgtaatgactacaccaatcttcaaagccgtcttgagaaatgacgtgtcagcttttctcgatctcgtccaagcgaatccatcagtgctcgaggaaagaaatcatggggagagtttccggggaacggttttgcactttgctgtggaagcgggacatggagagtttgtggcaaggataatcgaggtttgcccttcccttgtccgatcaaccaacagtgatggcgacacacctcttcattcagcagcccgtttgggacaagcgagcgttgtgtctcagatgttagagtctggacaagctttgtgtatggctcttaacggcctaggggaaacaccgttaaacttggcctgcgccaacaaacaccttgatattgcgggactcattctggaaagaactagttcgatcaccatcgtcgaattttatgccaccattaaagaagactcgacaggttttttatag

SEQ ID NO: 194345 - DNA, 88 bp, Arabidopsis thaliana landsberg
tcgaggaaacatggtggatgagattcttcgtgagatggaggagaacaacgtggatcctgatcttatcacggtcaaccatgttttaaag

SEQ ID NO: 194346 - DNA, 399 bp, Arabidopsis thaliana landsberg
atgacgacccatgcatttcgttatgacgtggagtttcatgagaactattatcaagacggttctaatcagaatgtagatgtgtcggtaggtaacctttctaacaatattctagacttgatagctggtgctcctaatccatagaatcatagccgtcgtccctaacccttaaaccctacgccctcacgttaagccttacaccgtaagtctgaatccaataccttaaaacttaaacactaaacgctaaaccttaaccttaaaccttaaacccgaaatcctactttaacttccaggttctttttgtgtttctagttcttatactgaatgataaacaatgcatcaagacatatttgactacaaaaacacaaaccaagcttcttcttgattctcaaagctttgatg

SEQ ID NO: 194347 - DNA, 623 bp, Arabidopsis thaliana landsberg
atggacatcgccaccaagttcgcctctggccaggaggcggttgaggccatcttccggaaggataagcagccccagggccgccagccggaagatgtccctgaggcgtccactcagcgcggcaccaagaagaaaggcaagaagaagtcgcaagcgaaacgcgatgccgccgactcggaccttgtcgccgccgccgagtacaagaaccctcggaaacctcccggaggcgccaacctcttcgacaagatgctcaaggagccgtgcccctatcatcaggggcccgtcaagcacacccttgaggagtgcgccatgcttcggcgccactttcacaaggccgggcacctgcggaaggtggcagggcccgcgacgacgataagaacgaagatcaccaagtcatgaagaactcccactgccgcgacccgaagatggaggcctactgcgacgaggttcggcgcctggaagacaagttcttcgggctcgagctcaaccacatcgctcggcgctacaacgaaaccgcagacgagctggctaagatagcctcggggcgaacgacagtccccccggacgtcttctcccgggatctgcatcaaccctccgtcaagctcgacgacgcgcccgagcccaag

SEQ ID NO: 194348 - DNA, 268 bp, Arabidopsis thaliana landsberg
atgggcaacccggatgagaaggcaaagatggcgagaatcagtgtgctcaccaacctcacccacgtgcaactcccatatgttgcaaagccatgcggctactccctctttgcgcacgagatcttcccagttcccaaaagctgggcagccaagacctgcaacctcgtttactttaaccagcacgagcatggaggtcatttcggggccatggagagacccgaagagcttctcgcggatgttgaagaatacgtcaagagggcgtggaaggcta

SEQ ID NO: 194349 - DNA, 148 bp, Arabidopsis thaliana landsberg
atggctactactccaggccggactatgagcacaaccgcgggaagacgggatgggaagagtggtcggacggaatggctgtacgtagccggagaatgtgcgaaattaccacgttgcaacaaatattgcgtctctaatgggtttcatcttg

SEQ ID NO: 194350 - DNA, 788 bp, Arabidopsis thaliana landsberg
atgtggaactcttacatcatagacttctttcgtacagacaaatacaaatctatggatatatctgagcttgttgaagacgatgaggaggtactcctgaagagccatggcaggattgatactcatgggaaaaaaactgatctgattcagctggatgttcccttaccaatcagagagcgtttacagctggtaaaatctggcatagtaagggatactacatcagaatcgagagagtttaccaagctaggaagggattcatgtatcatgggtgaactgttgaagcaggacttaaaagacgataattcatctctctgtcagtctcaattaacaatggaagttttccctctagaccagcaagaatgggaacatctaatactctgggaaatttctcctcaatttagtgctaattgttgtgagggcttcaaatctggacttgagtcagcaggtataatggtacaggtgagggcttcaaattcagtgactgaacaagaaagcttaaatgtgatgaactctggagggcaaactcaaggggacaataacaacatgctcgagcctttttttgtaaatccgttggagtcttttggctcaagaggttcccagtctacaaatgagtccactaacaaaagtagacatcatccacaactccttagattagaatctcagtgggatgaggatcattatagggaaaatggcgatgctggacgggagaatttaaagcagcttaatagtgacgctcgtgggcgcttgagtggacttgcattgcaagatagggatatgtgggatgagtcatg

SEQ ID NO: 194351 - DNA, 280 bp, Arabidopsis thaliana landsberg
atgggtaagggctgctatcgcaggatatggttccgatgcagccaaaaacctcagctccaattttgatattgcaggcccgcttacagaaagcgtactcatgggcaatcttgccatacgcagctatcatgtagcccgtatcggcgccaacaacaaaaagacctatcccggcaggaacatcaaactgctgtgggatggaccgaatatgcgcatcaccaatttcgatgaagccaaccagtttgtgaagaggacgtaccgtgatgggtatagccttggtgtataa

SEQ ID NO: 194352 - DNA, 169 bp, Arabidopsis thaliana landsberg
ctgttatgatgaaaccttttgttcctgtttcgacagtgccaaggaggtgaatggtttcactatacatgcgttggcctcacacctgagaccagattcaaagggaaatggtactgccccacctgcagactcctcccacagtcacactaatatcatttgtacctgtgagaag

SEQ ID NO: 194353 - DNA, 557 bp, Arabidopsis thaliana landsberg
atttctatttcagattacttacattatttggatgtaatgttgctgaaacagatcactgttttgacgaaaagcgtaccacttggggtattccaattccagaaaggattcccatatgcaaacttcagactgaactttatcagtctgaacatgtggtgaaaggagacttcaagattattgcagaggttgatgtttttgaagctgttgggacattgactgaatcagatatttcgggaaaagcatctgaacttctgaccaaaaaaatacggaatgatggcaatgagtctggtgatttgctcaagaaaacttcaccagaaaaagaaagcaaccatgtcaatgaatctaaaccggtaagaaagttaagaaactttgtggtactttacaagagacatgctgctatgtgttctgtattacaagagcctatttgtttgctaggaatctttcattacaccaacggagaagcaagttgggcagaagttcgtgtgggtgatcaaaaatttcttcttttcaaattccgagaaatgttattctgatccatttgtgatccgtggcttcaaatg

SEQ ID NO: 194354 - DNA, 839 bp, Arabidopsis thaliana landsberg
atggcgcttgagcaatgccattaccctttcaaagcatacgtctgtaacttcgtcagtttcttggatttcctcatcgacactgataaagacgtggacttactcatggagaacggttccctttctacgtatacatatatatattgtttgtgtgttaaatatccattttccacattatcaatgcttgtcttgttttgtactcgttagctatttttggttaaatttacaagatttgacgtttaaattttatattgatgcatagaattatcaatacttaagacgaatttcatacttgagtttgattagatagacatttctagcatttattcttaaaacgaagatattgatgtttagaaatatttgaacccctattatctgtaaatcatgtttttcagcatgttatatatcatatgttgttttacttttatcaatacaaatgtttaaacagtataaaatcttgtaattccaattaagtactgctcgtctccgtgttcgctaggttatactgcttgcttaatttttcttgaataagtgacagtaatatgatatatatggttttgaaagggatactaaacaactggggggagaagagttctgtggcggtggcggagatggtgaacacgctattttcgggggtggtggagagtcgttcttactatgctggtatagcgtctagagtcaacgcctattatgaaaatccagtcaacaggtcacgcaccatcctcggacgccagtatttcggtaatctatggagaggtaccgctactgtcgccgctgcgcttcttttggtgatgactcttatccagacggtggcttctattttccgggttatgcaaaagtga

SEQ ID NO: 194355 - DNA, 1603 bp, Arabidopsis thaliana landsberg
gtgaaaattgattttcctcggtttgatggtacacggttgaaagagtggttgtttaaagtcgaggagttttttggtgtggattcaactccagaagatatgaaggttaaaagggcagcgatccactttgatagccatgcctctacttggcatcagtcctttattcagtcgggtgttggtcttgaggtgttgtatgactggaagggatatgtgaacctgttgaaggaacgatttgaggatgattgtgatgaccctatggcggagctaaaacatttgcaggaaactgatggcatcattgattatcattagaaatttgagctgattaaaacaagagttaatctctctgaagaatatttggtgagtgtgtacttggcaggactcaggacagacactcaaatgcacgtccggatgtttcagcctcaaactgtgagacattgcttgttcttgggcaagacatatgagaaagcacaccctaagaaaccagctaatactacttggtccacaaatcgttctgcacctactggcggttataacaaatatcagaaggaaggcgagtctaagacagatcattatgggaacaagggaaattttaaaccggttagtcagcaacctaagaaaatgtctcaacaagaaatgagtgataggaggtctaaagggctatgctatttttgtgatgagaagtacactccagaacattatttggttcacaagaaaacacaactgtttcgaatggatgttgatgaagagtttgaagatgctagagaagagttggtaaatgacgatgatgaacatatgccacaaatttctgtcaatgcggtttcaggaatagctggttacaagactatgagagttaagggaacatatgacaaaaagattatcttcatcctgatagactcagggtcgacacacaactttctggatccaaatacagcagctaaacttgggtgtaaggtggacacagatgggttaactcgtgtatctgtagctgatggcaggaaattgcgtgttgagggtaaagttactgatttctcttggaagttgcagactacaacttttcagtctgatatcttattgattcccttacaagggattgatatggtactaggggtgcaatggttggagactttgggtcgtatctcttgggaattcaagaaactggaaatgcgatttaaattcaataatcagaaagtacttttacatggacttacatctggttctgtcagggaaagtgaaggcgcagaaactgcaaaaactacaggaagatcaagttcagctggccatgttatgtgtacaagaagtttcggagagtacagaaggggaactttgtactattaatgctttaaccagtgagcttggtgaggagtctgtagtggaagaagtactcaatgagtatcctgatatattcattgaaccgactgctttacctccatttcgtgagaagcataatcataagattaaattgttggaggggtctaatccggtgaatcagcgaccctatcgctattcaatacaccagaagaatgaaattgataaactggttgaggatttacttactaatggaacagtgcaagctagttctagtccttatgcttcacctgttgttttg

SEQ ID NO: 194356 - DNA, 211 bp, Arabidopsis thaliana landsberg
atgtgccatgagatgagacggtcgatgaagcacgtagggatccacgtgccaccgtggaggagaaacggttacatgcaagctaagtggttcggtttctataaacgaacttcgacgaccaataactacgaaatggttaatacttatgatacgactgcgtttaagggttgcaaggaagagttttgggaagctaaaggtcttaaggttatggttg

SEQ ID NO: 194357 - DNA, 777 bp, Arabidopsis thaliana landsberg
atgtggcaatgtgtgatagttgtcgacggatcaaggcagagcaccagagacccgctggattgttgcaaccgttacaaattcctcagtggaaatgggatgaaatcggtatggatttcatagtcggattgcctcgcactcgagccggctacgattctatttgggtagtagtggaccgtttgaccaagtcagcccacttcataccagtcaagaccaactacagcagtgcagtattggcagagttgtatatgtcttggatcgtttgtcttcatggtgtgccaaagaagatagtgtcagacagaggaacgcagttcacatctcatttttgcagcacttgcatgaagctttgggcacacatttgaacttcagctcagcttatcacccgcagacagacggtcagactgaaagaactaatcagatcctagaggatatgctgagagcctgtgcgttgcaagacaagtcaggatgggacaaaaggttaccttatgcagaattctcctacaacaatagttatcaggccagcttgaagatgtcactgtttcaggcactctatggacggagttgcaggactccgctgcattgggaccagcctggagagagacaggtgtttggccctgacatcttgcttgaagccgaagagaatatcaaaatggtttgggagaatctgaagacagcccaatcaagacaacgaagctatgcggacagaaggagaagggaactgagttttgaagtgggagactacgtctatctgaaggtgtcacctatccgaggagtcagaag

SEQ ID NO: 194358 - DNA, 215 bp, Arabidopsis thaliana landsberg
cttcctctcagcatcgtgcaggtcctcttcccttttcaacaaggccactagcgcagcctcaaggtcagactcaagcacgccaaggtttgaataggggagatcatcatcgtcaggataaaccgagtgttgattggtttgtctctccaatctgtgtgtccgagcaaataatttatcgaaaagaacatttgcagactcagctgagccattgtcgttga

SEQ ID NO: 194359 - DNA, 139 bp, Arabidopsis thaliana landsberg
atgaactcagcctttgtaatagttcctgttttgtcaaaagcaacaatcttgatctttgctaatgtctctagacaatcaccagttttgatcagaaaccctgacgtggctgccttagtgagagcacaaaaggtagcaacag

SEQ ID NO: 194360 - DNA, 119 bp, Arabidopsis thaliana landsberg
attcaaggataactcgatttgatactaaacttagtacgagaaggtgcttagaacacatacgggatcagataaggctagcagctctagtattggtaataaatcttacaagggaatactag

SEQ ID NO: 194361 - DNA, 179 bp, Arabidopsis thaliana landsberg
ttgcactcttggtggaagttggatggagtctcgcaagattgattcagatcatgtgtttctcggttacactagtagctcccacataacaaaacatctagaagggtcgttgaagttgaaagaacatcataaatgtgttcctacggaggcttcaatcgaatttgaagtgatagatggagcag

SEQ ID NO: 194362 - DNA, 871 bp, Arabidopsis thaliana landsberg
atggcaaagattcgaaaggcaaattttaattggtgagttaacaaatacagtatatatattactgtttagtgtttagctatcaaaaatgtgtaattaatttcacaagtttcaaaccatggcatttacaaaggttgttaataaaatttaaagagttaaaaaagcattttatcatatcacaattagaggttaagaaattaattagactgctatcttaaaccatatacatagtagctagatgatatccgagagctatcgtttagtctactttttaattttaactatggaaccaaatttttctgaaagaaaaaattagaatcgtttactttgacttattgactttgattgaggtatcgttgtcacaaaccatcttctacttcacgttattcagcagtactaatcagagagagagagagagaagaaaccttttcagtttataaatgggagctctatgatgtgaaactcaaatcaagaaactcgaaccatgtcttctctgatctctttcatgttccttttccttttctcattcctcactagcttcagtgcttctgctcaaaaaccttattacctaaatgggggatgtctaactacgacaaattactcaagtaacagcacttacttcaccaatctcaaaacacttttgtcttctctctcttcacgtaacgcctcttactccaccggattccaaaacgccacgtcaggaaaagcccccgaccgggtcaccggactttttgattgtcgtggagacctcccgccagaagtttgccataactgtgtcgcctttgccgtcaaggacaccttaattcggtgtccgaacgagagagatgtcacgctcttttatgatgagtgtacgctaagatactcgaaccttgtg

SEQ ID NO: 194363 - DNA, 430 bp, Arabidopsis thaliana landsberg
atggtcgggacctggctttttgctcccttcctcttcaatccttctggttttgaatggcagaagattgttgatgattggactgattggaataaatggataaacaacatcgggggtattggtgttccggcagaaaaaagttgggaatcgtggtgggaggaagagcaagaacatctccggtattccggaaaacggggtatcatcctcgagattgttttggctttacgcttcttcatctttcagtacggactggtttatcaactcagcacctttaaacaggaaaatcaaagtttgtgggtgagagctcttacccatctcatgttgctcttcttgttttcgaattctcttggtttttaataaattgattctcaatgtttcacagatttatggagcttcatggttcgtgatcttattcattttacttattgtaaag

SEQ ID NO: 194364 - DNA, 88 bp, Arabidopsis thaliana landsberg
atgaatttctccttaataagaattcgagttttcgttgatgtaaaccatgaactctcgctctctcctattttttggcgatttcgaaaat

SEQ ID NO: 194365 - DNA, 374 bp, Arabidopsis thaliana landsberg
atggagaagacgactccaccagcggaggagcttctaaagaagatacgagagttagaagaaagccaagagcatctaaaacgagagatgtcgagacttaaagtatcggcggagatgaagcagcgttcgcattcagcatcgccgcaacgtcctgtgaggagaaacagtaacgacggaactccgatgtggagaaaaaccggtgcggcttcgtttcgtcactcttctccgttgcgtaagaacaaccatgcaaaagtttccggcgccgtaggcgaggggcaatcggcaggcaagttcgccgataccgagtatatgaatatttcctagtctatggctcaaactgttcatgtcttcgatctaaatggccgcattatcttttg

SEQ ID NO: 194366 - DNA, 180 bp, Arabidopsis thaliana landsberg
atgtcggaatcttgtcgaaaattcgaaatacagttaggatatagacttactggacctttgagaagttcagttcaaatgcgacttgatagggatgtgactttactggataagaaatgcaattccgtcgtaagaatttcgtccggaacagaagagagaaagagaaaacggcgacggaattag

SEQ ID NO: 194367 - DNA, 225 bp, Arabidopsis thaliana landsberg
aactattttagaatgtaccacaagctctgtggtatgacaggtacggcagaaacagaagctgctgaactttgggaaatttataaactggatgtggtgagtattcccaccaatgttcccgttattcgccaggatcagcatgacttggtctataagaccaagcgtgaaaaatatggtgcagttatcggtaaaattgtagaatacacagaggcaggccgacctgttctg

SEQ ID NO: 194368 - DNA, 485 bp, Arabidopsis thaliana landsberg
atgatagagctggagtgcccgatctttcggtgagtggagataattccgatttggtggaagtagaccctcacgatccgactacgacgagcaaacccgaagcgccaatgcaatcgctgaaccaactcccaatggttaccgaccttgctgatgcgagattggcctgatcatgaagattgtttcctgtgcgcaatcgtagaacgaacaagaaaaagatgcgagcaatcttaatatcactcgaggtggagttctaaatcacagaggacagcacgtatttgtgcatgttctggggtagctaaagctagatgtaaaacaaaactcaagttctaaatgaaataggactctgactaaataaaggagaggcgtgaacagtagggccggcgctacagtaccgcggttactgttcacgacttccctaggtgcccatccgggccttcctgttgggccatctctaacttctgggccttcgtctttacagcatgatgtag

SEQ ID NO: 194369 - DNA, 320 bp, Arabidopsis thaliana landsberg
cccttgtcgcccatgagcggcacgccgaggcgacgaagatcgccgacgacgaggccggcttggtcgacgagcgccggatcgccgattgcgatatctacggtttcagcccgctgtcgtctctgggtgcgggcgaagagggccggcccgactctgcgcaccatgggcgcgggcatgctctatacctccggtgccaccggcatgaccaaaggcgggaagcgcccggtgaccggggccgaccccgacgccgtgccggtcacctgggccgggttattcgcgctctatgacttggcgccgagcgacaatcacgcgcacatctgtgg

SEQ ID NO: 194370 - DNA, 31 bp, Arabidopsis thaliana landsberg
gtcctaagtccacacaaaccgtgctgatgcg

SEQ ID NO: 194371 - DNA, 338 bp, Arabidopsis thaliana landsberg
aagaaaggctaaagagccaaaaagttctaattattcttgatgatgtggacaatattgagcaactcaaagccttggcaaaggaaagtcaatggtttggtaacaagagcagaattgtcgtgacaacccaaaacaaacaacttttggtttctcatgatatcaaccatatgtaccaggtggcttatccttcaaaacaagaagctcttactatattttgccagcatgcttttaagcaaagtccccatcagatgatttaaagcaccttgcaattgaatttacaactcttgctggtcatcttacgctggctctacgggttcttggttcgtttatgcgtggaaagg

SEQ ID NO: 194372 - DNA, 388 bp, Arabidopsis thaliana landsberg
atgcttgctgcggtaggtatcggcagcactttgcatgttgtccatatcgatgttgctgaaggagtgaagctccttcgacacctcgagtttgacatggcatctgacacctggagctcgactcaagaggttgtgaccctaggcgggtctgcgactctggcaggagatgttgttcaggctgcagctggcccatcgcgatcgctgcacgttgctgtttccgcgcgtagtgatgacgagtctacctacgatgtcatctacgcgagcaggacgtcgggcggcatgtggtcctcggagagtgtcgatactgggtttgccttggcgcccgtgtacgtttccgcggtgcaagctgatagctcgggacgggtgttgcttctggtggacgacggctccg

SEQ ID NO: 194373 - DNA, 119 bp, Arabidopsis thaliana landsberg
atgctggagagcagtggccaatcgccgcagatccgatcccggcgaaaaccagaaactcgccctttgacgaaggcgaggctgatccgctttcagcgggtcggtatcggcgtctcgccgcg

SEQ ID NO: 194374 - DNA, 106 bp, Arabidopsis thaliana landsberg
atgatgatgctcaccagggtggtaaccagcgggacggggtggacgctgatgcaagagggttgcgcctccgtgaagaactgtgaggaagtgtcccactccaccgaag

SEQ ID NO: 194375 - DNA, 436 bp, Arabidopsis thaliana landsberg
atgcaagggatgtctgagcagaacaaggaattgctggataagattcaccgccagctaagtggtactgaatcggatctttcgtcaaacggtaggaagtcgataaattatcatttgtccaacattgctgctgatcttaggaaatggtcgcgagaacggagggatgatcgtgatagcaggatagaaaccactacgtgggcgttgggtatcctggccatcgtcgcctttgctttgattcagcttggcgggcaggagaattctgacttcgaatgggtgcaggagaaccaagtcgcaattaagatctggggagtagtgctggccgcggtttacatcggtgtgtcggtcgagcgatcagagttggtcaagtcgctctggatgttctcatttaccaagctcgttgcatacctaacggcttctgggttgatcgtatattccacgg

SEQ ID NO: 194376 - DNA, 4852 bp, Arabidopsis thaliana landsberg
atggccgagtggtctaaggcgccagatttaggctctggtccgaaagggcgtgggttcaaatcccactgtcaacataattattattattttttttaatttatatataggcttcaaatcaaacagtgacacttttttggtacaaatcaaatagtgacttatatattagagaaattgttggaaaaaaacaaatgtgatatccattgcttttgcggaaacgttgacaaattattggcgaaatggtgacttatatatttgagcaacatacacactcgtttttatcttatttttatccaaaaaggggaaagtagatgaattatgtggattttattagtgaatatgtgatgcatttcattagtgaatttgtttgtttcgaacacctaacaatcaattatgtttgagaggatattttcagggcggtcctgaggagagcaacatgaaacatttgtatgtgaactcatagtttttttcaaaaaattacattaaaatttatttgtaaataggcccccaaaaatatttaatttgaaaaaaaccttaaattgcaaaacagtttatactccctccctctctttcatcaaaattgatgttataggtttcttttcttgttccaaaaagtttgatgttttagatcaatattattagtatttttatttgtgaccaatatagagaagagagaggcaatgtctgatattattaaacaaacaaaagaataataaaaaaataaaaaagttatttttcttaatttgtgtgaaaaacccacaacatcaaacttcatgaaacagagggagtattaatttcaaaatatataatttatggtttagatcccagattgtcatgaccgaccgttgatactttgcatagcttagaacttccatctctgcgtgtagtagagaatgactagtttggtaacctaatttacttatagatctttaaacatatagatcatttgacccaatttactgccacgcgttttaaatgtactaactactaagtatgaataaaatgatcaatttgagtcacaaaaagtatgtttattgtgatcaattgtgaaatgccaactcttttacaggtattactaggttgatgggaaatattttgctagggtccccgaccaaaccgcactaacaaaaacatgaaatttaattagaaaaaaaaaagttgcaatatttggaggacgatagttccgttgtcaaatgatgaacaacgaagaaaccgtacattgatgagataagttttatgtgaaacacatcttgccacctatatttatgtaactatgtgaaccataataatcataagctctttacaatatattttcttaggtttggttgtgaagcaaatttatggaagaaaaaaaaaatagtcgtccacatatttccaatctcttccactttgattctcttccatgcaatctttcttcgaggtttaaagcattttctatgatacaaaagtataagagatgtgtatccagttgcaaaacttatactatgaattgactatactattttgataatttctataaccataacggctgcatgaactatatacttaaaactatgactacgatagtcgcaataaatgtatcgtactatccttcgaactcttatacgatttaaaaccttagcatatcaaacatttaaatttctagatagtgatatcaaaatcctacagccgcaatttttccagaaaaaggtgataattttttttttttatcagcatattgcttcgatgcaaaatacgtggaatctatgcaaacaaatttgtttcttctgtatagttgcttattgagctgagtggttgtcagtcaccaaccctcttcagatctcaaagccacaataaaatacgttaaattaataattaccaacctcaaaactataatctatatatatatatatataatcagcattttcttcagtgtctctctactctctctcagatttgcatttgcttttttttggtttggttatggagcgcgcaaggagacttgcttacagaggaatcgtcaaacgtctcgttaacgacacaaaacgacaccgtaacgctgaaacacctcaccttgttcctcacgctccggcgaggtatgtctcttccctttcccctttcatctccacccctcgatctgtcaaccacacggcggctttcgggaggcaccagcagacgcgttccatctccgtcgatgctgttaaacccagcgatactttccctcgtcgtcacaactctgcaacaccagacgaacaaacccacatggctaaattctgtggctttgaccatatcgattcactcatcgatgctacggtgcccaaatcgattcgattagattccatgaagttctccaaattcgacgctggtttaaccgagagccaaatgattcaacacatggttgatttagcttccaagaacaaggttttcaaatccttcatcgggatgggttactacaacactcatgtccctactgtcattctccgtaacatcatggagaatccagcttggtacactcaatacactccttatcaagctgagatctctcaaggtcgtctcgaatcgctcctcaatttccagaccgtgatcacagatctcacgggtcttcctatgtccaatgcgtcgcttctggatgaaggcactgctgctgcggaggcaatggccatgtgtaacaacattcttaagggtaaaaagaagacctttgtcattgctagtaactgtcaccctcagactattgatgtttgtaagactagagctgatgggtttgatttgaaagttgtcacctctgatcttaaggatatagattacagctctggtgatgtttgtggggttcttgttcagtatcctggtactgaaggtgaagtcttggattatgctgagtttgttaagaatgctcatgctaatggtgttaaggttgtgatggctacggatttgctggctttgactgtgttgaaacctcctggagaatttggggcggatattgttgttggctctgctcaaaggtttggtgttccgatgggttatggtggtcctcatgctgcgttcttggctacttcacaagagtataagagaatgatgcctgggaggattattggtattagtgttgattcttcaggaaagcaagctctgcgtatggctatgcagactagagaacagcatattaggagggacaaagccactagcaacatctgtactgctcaagtaattacttcttagtatctgattactcatttttcacttttcactattagttcgttcagataactagatgatatgttgattcatgttgatgagtacttcatcttttcattttcttgcaggcgttgcttgccaacatggctgccatgtatgctgtttcccatggacctgcaggtctaaaatctattgcccagcgtgtccatggtctcgctggtatattttccttagggttgaacaagcttggggttgcagaagtccaagaacttcctttctttgacactgttaaaattaagtgttcggatgcacatgcaattgctgatgcagcttccaaaagtgaaattaatctgcgtgttgtggactcaaccactgtgagtctcctttgctttggcctttcaaggtttttactctcatagcatcatacagatttgaatatttggatatgattacttaattcagattactgcttcctttgacgaaacaaccaccttggatgatgtcgataaacttttcaaagtttttgcttctggcaagcctgtaagtgttgttcatacctctttttgttattgatatatcatttctaggatccttgcatgaaatttgactatctcaattcgcttcaggttccatttacggctgaatctctagcacccgaggttcagaattccattccttctagcctaacaagagagagtccttatcttacccacccaatcttcaacatgtattattctgttctttgaatcttgagtggcttattacttgtggattggcagtatctcatttttgttttccattttgataatatgattaggtaccacacagagcatgagttgcttaggtacatccacaagttacagtcaaaggatctatcactgtgccacagcatgattccgttgggatcttgtacgatgaaactaaatgcaacaactgaaatgatgccagtcacatggccaagtttcactgacattcacccttttgctcctgttgaacaagcacaaggttatcaggttagtgactttcttgattcatctgaggtttgatttagaaagttgaacaatgaactgatatcttgtccacatgtatgtaggaaatgttcgaaaatttgggtgacctcttgtgtacgatcactgggtttgactctttctcgttgcaacctaatgctggtgctgctggtgagtatgccgggcttatggttatccgcgcatatcacatggtaacatcttttatcctaaatttggatcttattctacctaacaatcttctattcaattgtattaagctgaaaagtgaatgaatgaatgcatttttcagtcaagaggagatcatcaccgtaatgtgtgtatcatacctgtctctgcacacggtacaaaccctgcaagtgctgctatgtgcgggatgaaaattattacagttggaactgatgctaagggaaacattaacattgaggaggtgagaaaagctgcagaagccaacaaagacaacttagctgctcttatggttacatacccttcaactcatggagtctatgaagagggcatcgacgagatttgcaacataatacacgaaaatggaggtcaagtgtacatggatggtgccaacatgaatgcacaggtgaaatatcttactaaaacagaacacagagatcttgaattttgtctaatttgtaagagcatggtgttgg

SEQ ID NO: 194377 - DNA, 927 bp, Arabidopsis thaliana landsberg
atggagaagtccccggtggtcatggccgaagaaggagaacactcgggagctaaggaacttcccaaacccaaaatctccatgtcggatctcacctttgtcataggcgtgtacacaaccaaatcaaagaagttaacagttgtagaatttggcgcggaccgcgagtttaaccctaatgaccggttcaaaatagaaatcgtagacttgagtcgttttgaactgcccaagtctggtatggatgatgtaatgatcacttgggaagtcgtttataagaaagattggcaaaacattgtcacaatcgttaaaggtcgaaggtcattagacacaaacttacgatggttgttcaacgatcttcttgctccagaagatctaatcagacgtggcctaaccggcgatgtcaaggtgagtttaaacggcgacttacttgacaagatcagccttgagatattcattgaaagcgaccagagatatttttcccctgaagatactcttagatatcttcaatgttttttcccctctaaaaactaattattatgtatatacaaagtctgtgaaatttaaaaatatgtaagcgtttctacctaaataatcaagagctttgttttgcaccaaaaaatttactgcaaaggcgttgatgcttgatgaacaagaaaccaatcccctattttttttttatcccctattttcgagggtttaccggagctcagaggtctcggagattgttgaaatggatgtttgagaaagagagatgagctccggcggtgagataacggcggcggtgttaagcggaggagaaatgacatttctctccaaaacaaattgaatcgaaccaaaaggaatatcaacttctaattctaatttgatgataattcgtcttaaccgaagctaaaccgagaatttaagcggttgctaagatctgaggccttttaa

SEQ ID NO: 194378 - DNA, 167 bp, Arabidopsis thaliana landsberg
atggacggagattgtgcaggagctgcaaacgcggttgtcggttcaaatcgcaacgctggagtcggagctgaaaacgatgaatcgggcgtgggaaaccgcaccgccttcgacggaaccaaaacagcagccaggcccgggttagctcattgccgattccgcggctgcgg

SEQ ID NO: 194379 - DNA, 436 bp, Arabidopsis thaliana landsberg
gcaagtgctgagtttgttgaacgagttgctgagtctgtgtttgctgatctaaagatcaagaagggtgagagagaggagaaggcgacgggatctgagctccgattggtgggttagaagaagtagggttgggagagtagatgttaggttgcgaattgttgtgaattacaataccttcggtggtagttacagtcatcgccggagacgcagcggaattaacagaattggaaatcggagctgtcatgagttgttgttgttgagatgatgatgaaggtaaaggagtagaagatgcaggagaaggttccataggattaggagattgtagagatttcggtgacagagacgatgagggaatcggttccgccattagaagaaacccagctgtgaagaagaagaagaagaagaagaagaagaagaagaaggtgtattatttggttga

SEQ ID NO: 194380 - DNA, 270 bp, Arabidopsis thaliana landsberg
ccgggcacgccgacgagcaccggggcgccgtccggcagcctgcgccaccgggcgggcgccgcgaaacggacgaaaccgcgggaggcgaaggcccttgcgagcagcacccggccggcgccgaggaaggcgaccacggcgctgccggcctgctcgacaagcggccaggacgacgcggcggcgcccacgccgaacgagaccagccggggcgcgagggacagggaggcgagcgaggtcgcggcgaagccggccggcccgggggcggcgcgcacg

SEQ ID NO: 194381 - DNA, 113 bp, Arabidopsis thaliana landsberg
tttatactagagtcaatccaacggttggtattgtcgatagattaacattccaaattctgaccgtcatcgtcaccaacctccacgtctatgtgaagatgattcaatgtcgttga

SEQ ID NO: 194382 - DNA, 519 bp, Arabidopsis thaliana landsberg
atgcatttttctacgaactgtgataacttggtagaaactgcaacgacggtagtcgggcaactcatggagtctactgtccgtcataatctagttaatgcggcaattgattcggcggagcgcgcgaggcggtgcttggagaagaacgactggccactgcttgcgaagcttcatggagattttcagtcggttgagctgaaaaacacagaagatgaactcagaacacaggacgcacgcatgcgcgctgtactggttgagtcttgttctaggttcgcgttgatcattattggatacagtggtcgtgatacttctgtaatgcaggctttgaatgatgtcttgggcaaggatagctcttttcctggaggaatttattgggtgacgcattcatcgatcgatcttctcccgaccgtccaagagttcttggattccgcaatggctaagggagtgagtgccaacattgtccatgcccaaaacttcgatgagcttgcaggcgatattgctgataccgttttctttgatgaa

SEQ ID NO: 194383 - DNA, 449 bp, Arabidopsis thaliana landsberg
atgtttaatggatttgcagagcttgctttgatgattcagagacttcccgtgttctacaagcaacgagaccttttgtttcatcctccttggaccttcactcttccaacatttctcttgggtattcctatctccatcttcgaatctgttgtttgggtcaccattacttattacatgatcggatttgctccagaactcagcaggtgaagatgattcttgaacccgcaacgtgttaacattgtccatatagataatattaaccacctagtaaaagtaatgttagctcaattggttatttttgtttggcaggttcttgaagcatttgttggtgatatttctgacacagcaaatggctggtggtatatttaggttcatcgcggcaacttgcagatcgatgaaaattgcaaattcgggaggagctctagttatcctcctcctcttcttgctggagg

SEQ ID NO: 194384 - DNA, 1944 bp, Arabidopsis thaliana landsberg
caaaagctgaaatccaagaagagcgaaaagaaaatctggataatcaccaagaatcagaagctgccactgaaaaacaattcgaacatggagcgtaagttgtagtatttaatcgataaagtatcactgcaagagaaacatggactgtaaggatgtatttaatcgatggattgttgacaatgctcacatcccttgggatttgtcgcaatggatggatatagagtttagggtttgagtgcggcactagtattactgagaaataagataacaaaatcacatctacatctgaagttttcgacacactcaacatccaacggtctgaaccaactaccaaccaaaccaataacatcgtctaaaacctacaaactgattgaataaaaagataagctagggaaggtatcatagtggttcggtacggtttgaattggttagatgagattggacccctaccgaaaatagagtcttcggttacatttggttgatttgtgggaagtgggaaccaaacggaatgggaagacggaagaggaaaggtttaggagatatcaatcagacctccaaggccaaagtcaccttccgatttaggtaaagctttgaaataaagagataaattactctttttcaccggacacgaatgagatatcgtaatttggtaaacttgatagaagatgatcagtgacgttatttctcaccaacactataattccattttaagaaactttttctcattttagttacagttttccagtttgaaatctctcacacctttacgactagactacaaaccatatctcttacccatcaactcttaaaaatcaggcattgctttatcactcagtaattagtatttgacgtttagagtgtactcgattagatagatagctttgcgtccaattctctactttctatttaccttgtttcgtatcgaaattgataacgtaattgactataagaaactcttttgccaatcacttgctgttgtgtttttatgttcctgaaaacagttcagtaactggttttcttataaatgtcacgaagagcttacattttcttataaattacataaatgaattctgccaattttctctttcagacttttcttaaatttgagctcttcgtgcagctaactgttgcctattgattgattaactactttttggttagtttgggaagaaaatggcgggtgacgatttggtgtttgctgttaatggagagaaatttgaagtcttgtcagttaatccttctacgactttgctcgagttcttgcgttccaatacttgctttaagagtgtcaagctcagctgtggcgaaggtacacacacacactgtgatatttttcgatgaatgtcaatatcttttgtggttttattttgtttatatacacttctctgtttgaatctctaattcgtatcaacaactattttgcttatgaatgaagatccttcaatttcgaggacctggatgattaactcttttgtctccaccagaacgtaaaagtcatgatttattatttgaatctgtgaacgatcatacaaatagttaaaatctatgtttatttactccttccttttcagaaatcaatcttgttgtgttttggttttgtgccactcatatttacctgaattagtataccacttgtctgacaagtgtttaccaaactgaaatgaggcttggaacttggtttctttttccttgtttcatgtgtctttgaacttgatatttttgtcttcttttgttgcctgtccggcattttcagtgtgtgtttctctcactgactcagctatatttttcaattttcacagggggttgtggtgcttgcatcgtaattctatcaaaatacgatcctgtgttagaccaagtcgaggagtattctataaactcttgcctgacccttctttgcagcttaaatgggtgctccataactacatccgatggactcggaaacactga

SEQ ID NO: 194385 - DNA, 385 bp, Arabidopsis thaliana landsberg
atacagagaactctacgtgtaacatactacacgacaccgcaccaaaagcattacaatcgcaagggagggctgccatcggaacaagagaaatcgccctcgaatgctacagtaaacccactacttcacgccaacacaacacaacacgtatctggcccgcacagacgagcggactcttcatatctttgctgggacagctatcgggatgatatcgaatatggcgctgctgccgtcgaccaccattcccttgaccacctccacgccagcgcgatcagccgcggacgccgttgccctcttagctccggcaacgtggtgcgaccggcggtgaccagcagggccctccgatcttggacgggctcgcagctgcgcggcgagaagctcgcgtggc

SEQ ID NO: 194386 - DNA, 1931 bp, Arabidopsis thaliana landsberg
gtttcatcatgagtaactacagtggagaatcctctatggaccctgactacaatggggatgaagctgagtcctggtctgctagaccgagagaacaacatgtttaccagagcttcagggatgaattcgaacgctctgcagcccgacgtaatcagagaagggctgaaatcgccagaggaaagagggcgatgtcaagtaggtatgagctgattgatgaggatatcgaaagtgagtatgagcccgagtcatggcgcaaggagacgaagctgctgaacaaacctgacgaggttacagtggaagagtatatcaggttctttgagatgaataatttctggggaacgcggtatccgtgctatgagactttagcccagctggggttactggaggacgtgcagcatctgttcgagaagtgtcatctggagaaactcatgtcttacccttaccctgcctataaggaggagacaatcgagtttctttccacgctgcaagtggagatgtatgaggcactcacggactttgagcgggataccatggggttaggcttcttgacgttctcagtgaatgaacagtggtatcagctttcgatcaagaagttggaagaactgtttggtttccctagtggaaagggaaccaaacccagatttgacagagaagagcttaaggatttgtgggccactatagggaacaatctaccgctaaactcggcgcggtccaagagcaaccaaattcgaagtcctgtgatccgctactttcagcgatcggtcgccaacgtcttttactccagggagtctacaggcaccgtgtctaacacggacatggagatgatagattatgcgcttacagggattctgcgtcggacgaaggggaagaatgtcttgagaggcgatctcaacaacgcaccaccagtaatgcctctgttgatgcatctgtgtggatacaggaagtgggcgttgacgaacgggaaaaagaaggtgagaggagcactatgcgtgggtggcgttgtgtcgccaattatggaagcttgtggagtaccgctcaaggaaccaggtttagcaccgaggatgatggacttggatcatttgcgcagatgtgagttcttggagtttgacatggctggcgactttcaccgctacaggttcgagcattcatcgattagaatcgccaacattcttctcccctgcattgacgctactaggattcttgagggcaggaacattgacttcaagcctgcgcttgaagatctttatttcgagggcagtccgccaaccgaggagtttagtcacaccgaaggagctacaacagaagatgttgatgagatggatgatatagatgaggcggagtttgacacgagcatgtatcatttcagtgagcatatacctcctacgagggaaagcaaaagtttgagcgaagctcacaggaacaacagcaagctacagaagtggtgcaagaaacaggacaagttactcgccaagtgcttaagggctatcaagtttctgaaggacaagctcagctgctcctcttccactacagctattccgcagggacatctccctcaggacatgccttcgaggagatatgacgcgcccgagccaagtcggcgcaggcctgagcctagagagtaggagattccgcatgtccctgcgaggcattcatcattcgagcctcgtgaaactgggaggaagaggaggaccacactcactcgatctagcagtaggagcggacgacttctgcagtctcgtagtttacgcgaccgcggtgctggccgcagcagaaggagagaggtcgagtttcctcagagcggtgctggccgccacagagctgatgaggtcgagtacccacctgctggagctgatacagaacaaggaggttcgtctatggcctgggagcaatcacatgcagccattgacgagcaactacgttcattcttcgactga

SEQ ID NO: 194387 - DNA, 1304 bp, Arabidopsis thaliana landsberg
aataatcaaatcataaaaggttctcttttcaatggaaaagccaatcagagaagcaaaatgcttccttatagactaacaaaatgccgtgaaccacggcgatacacagcattcgaaggggacaataccgtagcgaaaaatgtcttcaagagcacaaaatcgaatcaagatctaccacacttaatcacacttgttgtaagtgtattctaataactatcattaatgtaatgcagcttaagatgagattaaaaaaatggattaacatgtattgtgactgtgttgtgtttgttcaagtcttcaagttccaactatgaagcacatgtttgtggtattagtttattgaaccgtagaaagaacctgcaaaattaaaaataaaacagcatcttggtatcagtagaagataaccaccacaacggtagacaagaagcatctttctttgttttttttaacctttaatttttatttgttatcttggcaattaaagaataattaagcaagactgcaaattgcaggtgctatgatcaattttgaagttgacccttttgctaaatctgagaaaatttacaagaaaaattcattacagaaactaaagtttaatgctttgggcaagaaaccctagaacaatgactaacaaaacccacaaaaatctctatatctgatatcttccaaaggcggtacctacaccaggttaaattcatctcaaaatttaaataagatttcaaaatcaaatgtgtttagaagcaactttgttaaacagcaaaacgaaaggacagtaccctaaaatagctctccgtgtaaagaaaaaccagagaaacccaaatctcaaagctatcacaattttaaaattccaaaaaaaaaatgtaggctgtttctgaatcttcgagactttgacataacagattaaaacagaacataaacaaattcacaacgttgaagtttcgtacgttacacaccaaacttcacttgtttcttataaaaatttgttttagaaagtatttggtgaagatataatcataactttttctcagagtaggcacgcaaaaactgacacatgagactatgagagtctctttctctttacttcttttgaattttgttctctttaactatttcattcagtgaaatgacatctttcacgtcttctctaattaagtttagtcaacattttccgaaagctggttcggttcaataccaaaagccaaaaggaaattcctcctgttcactgttgttacttgttagtagaccttttgaccaaagaacgtcatgtgcttcccatggatcgattacatgagtggcatttctcctaa

SEQ ID NO: 194388 - DNA, 160 bp, Arabidopsis thaliana landsberg
atgaaaaagtttattgaaaaaagaggtatgtggcctatcggtgcatttttaacattgcaatggcttctggaagatccggacgctgccgaaaaatctttaagccgtggtaacaacgtcgttattacaccagaaaatctagaacatgaccgcgagtggaagg

SEQ ID NO: 194389 - DNA, 323 bp, Arabidopsis thaliana landsberg
gacagagcggtgagcattcgggctaccgtaggcgcgcaactcgagctcgtcgagagcaaatcgaattggtgcctctcgaccagcgtttctccgtggtttactcgtgctaggccgttggtacccaggagcagccgacacaccacggagcccatcaatgcccttgatcgcgccttcgcggctaaccttatccggcactaaaccccggcttcgcgcaactgcagagtgatgtccgtctggtagatgacagcaccgtcagttgtaggcaccaccttacgagtgacctcgctgaggccattgatgtacacggcgtacgtcccgcgccg

SEQ ID NO: 194390 - DNA, 234 bp, Arabidopsis thaliana landsberg
atcgcagacgcaaaaaaagccaatcaaagatgctggcttgacatgaacctatataaactgaatcattcaaatcatcaaatccaacaagatgtacacgaaagacaccaactttacacgaacccagataaactgaagcattcaagtcatgaaattcaaccagatgtagacgaaagacaccaattttacacgaacccagataacaggagcaaccaaattatcaaaaatccaacatga

SEQ ID NO: 194391 - DNA, 161 bp, Arabidopsis thaliana landsberg
aatttatgagccgctttcaaatgttacttttggaaagacaggctagaatttatccagatgacaccccagccacaaccggtacagcaaggacagatctctgcgaacttctcagcatgcgtggaatggaccctcctagatatcagatcatgatagatatctaa

SEQ ID NO: 194392 - DNA, 158 bp, Arabidopsis thaliana landsberg
atgacttacgtacaacacatgaaatcaagcaagtactgtctttgtccaatgggttacgaagtgaacagtccacgtatcgttgaagctatatactatgaatgcgtccctgtagtgatcgctgataacttcatgttaccgttcagcgatgtgctagattg

SEQ ID NO: 194393 - DNA, 282 bp, Arabidopsis thaliana landsberg
atcacgacgaactcttcagccagcgagatcgtcctaatgttttttttgttactctgatcgattgttttctgaataaaccagaagcggtccgatcctacgaagatacacaggtcctgacattgggtgaagcccgtatgtgcacgtttcggatttcgcaacatcgatttgagcttcaacagttcttcgctagcttgtcggtagaggcggcaatggctgaagttgagtctgtatcccggtggataggggacctccgcgaccgttaccctgagtcgagttgtcaca

SEQ ID NO: 194394 - DNA, 187 bp, Arabidopsis thaliana landsberg
atggcctccatctccgatcattcgcctccggtgatgttaaatcgggtcagtgagctaccgatcattccgttgaagcggcggcagcaagcttctgacaaaaccctaatcctcaagttgggctattcctttgtgctaggcccattatctgctggctctttattgtttccccctcagcccacgaagtgct

SEQ ID NO: 194395 - DNA, 428 bp, Arabidopsis thaliana landsberg
atgtttcaagattgttataggctgctattatcgaccacatataccaacgacaaaagtaagcccgttcagaagaccaatatcgttattcgaaagcatgtacgttgtcttgaagccctgcttgtagaatctgcaaattaaataacttctcgtatagtactattcacatatcacaacacaacttccattaatcgatttttgggagcgtcatgtgtatttttatctaataactctaacaaatcattgtaaggaaggatgagtaattcctctaagctttttacgtagaaacttttgcatgtaaatacttatgtgtaaaatttatagcgaaaatgaaaacatttgagaaatgtatattagtaaaagagaatcacttttttcatgtcaattttctcttttaggaaattcggtgcatggaattcatgcttagttag

SEQ ID NO: 194396 - DNA, 867 bp, Arabidopsis thaliana landsberg
tctggaacatatcttatcgttcaaagcataaatattctgacaatcttcttgagcaagttgagaagtatgcctctgctcggctcgagaatcagtccaagttgattactaaggtaactccaggtttcattgtctcatctgaaacattctatatagattttgagattcatgttttccctatgcatcaggttgcagctttgatggagtgtgataatgttgatgattttattgataagaaatctgatgaacaagttaagaaagatcttgttttggcgtgtaagagattcccttctatcattcttggtgattctcgtcccgtggaattatactccaatagcaaatcttacggtgaatcaagtagcattcttaaaacgccaactgataacagtttccttcctactcctatgcatggaggatggtttgatccggataatctttcgagaacattatcttccttctgtcctgagcttttacagaatgatgattcttctgatccaagagaagatatattagatgatggttcttcttttacgagcaaaactgctacttctgaagttgaagcaacgtctgatgatgtttttgccgctcagcgatttcttgctactagtatagattctatgcctgggttaagtaagaggcacagtaatcagctagacagctgtggttttcacacggtatgcatttgaatacatagaaacaacagtttcttcccaatgaaagggcttaagaccaattttcaaactgtctttccatgcagatgaagaaattattgcatcattttcctcgaacctatgcagatttgcagaatgcacaggttgatattgaggatggacagtatttgatatttgttgggaaagtcttgtcttcaaa

SEQ ID NO: 194397 - DNA, 363 bp, Arabidopsis thaliana landsberg
ggtaagattaaaaatgttgacatcaggaagctccttcaactcactgatcacattgtgaaacgcttcgcctgttcaagcaaagatgattatgttgtcaaatacaaaatttgtgaccgttacatagaaaacaatacttggaaagcgatcaaaaggtttaatcaccatgaaagtcctaaaacaaaaaggtacagtcattatatgattatattcaaatacaacaatcatgactactataatagaaaaaatgctagtagatcaaaagtttcatcttcataaaagttctaaaacaaattatttcttttcagatattctaaagtccaactgttcacagatggaaatgagcaattggccacagaaatctga

SEQ ID NO: 194398 - DNA, 311 bp, Arabidopsis thaliana landsberg
atgacagctaaaacaaaagagaagaaaaaaaatggaaaaggtagaagactaaggaagaagtttcaagtttctgattcagattctgatgaaacttcggctagagctgatgaatctagcaatgaggattctgtagaagtacttaacaatggtaatgagcccaagatcgcgaaggtccattcttcagagagtcctctgccttcaagggttacgaggtcgaaggcaagaaaatcgactttggaaagtggtgagcctgccaagtgtgagaagacatttgaagcaaaaattaatactcacaagactctggataatag

SEQ ID NO: 194399 - DNA, 473 bp, Arabidopsis thaliana landsberg
atgctcctgcactatctgcggcctgcacacgaaatgaacatctcgcgcgagcatgcgctgtacgcgttcgataatagtgagattttgatgcggttgctaaggaagatgcgggagtttgggatgcgggaggagatgatttgaaagtctggtcaacacacttgatacataattttttattcataatgcggataattatacaacctccttttaaacggcatcgttttcttgacgaagctggtgacacaacattttatggaaaagggaaggtgcccattgttggtgaacagggcgtttcgaaatgcttcattttgggcatgttgaaaatcaatgaaccgctggacgatgtgagaagaaaaattttggacttgcaagcttctattgaggacgatccatattttggtagcgtatgtagtatggagaagcgcaaagcaaagggtgaattttacctccatgcgaaggaagatattccagaa

SEQ ID NO: 194400 - DNA, 69 bp, Arabidopsis thaliana landsberg
ccaatcgcttcacgagacaaacgacgaacaacgcaattacgcgttcttatctttctgggtatttcttaa

SEQ ID NO: 194401 - DNA, 113 bp, Arabidopsis thaliana landsberg
aatgacgagactaaaacaaatgtggtcaagcattttagtgctagccgtggtggtgatcggagccagagctgtgcccatcacgtatcttgaatctgcagtggctaaaggagctg

SEQ ID NO: 194402 - DNA, 298 bp, Arabidopsis thaliana landsberg
atgatatctgatcggatgcacgcggctgtactgcactgcagttcggactgcgcaacgttctgcggattgcgagccatggcacacagcgagaaggctgttgcgtacacaacgatcagcaaatactgtaagcaaacccgatgtcacgcacaactataccagagctgctacgaccaacaaaccagacatagcccaactccaaaagctccacaacgagctgtaccgaaaattaccgctcaacggtgaaaagtgtgagaaacggtcctcacaccaaacttcccggctaaactctaaagagtaa

SEQ ID NO: 194403 - DNA, 75 bp, Arabidopsis thaliana landsberg
atgggcaatcggctcagcaagatcgtcacgcgcaccggcgacgccggcacctccgggctggcgaccgtcgaccgc

SEQ ID NO: 194404 - DNA, 190 bp, Arabidopsis thaliana landsberg
tgtagtttgattatgatggaagaagatggattgaataatcgaaattggggttattacgagccgtcacaattcagaccaaatctagggtttcaactaattccaagtatcttagaccgaaacgagaagccatttctctcccctcatagtcagaatctaaacttcataacaccttccaatgtctatggtggcg

SEQ ID NO: 194405 - DNA, 770 bp, Arabidopsis thaliana landsberg
atgcattgcgcccttccaccttccgagcccccggatgggagcgcccgtgttgctttcgtcttgctgctgttggaggagcgcaactttgcggaagttggcacctttcagccatcgctcggcttcaaggattttcatcaggcagcccggctgcattccctcaccgatggtcacccaagatggtgaccaccagttcgatggtggggagaagcaagccgggttgcggcctctgccctgccctcagcttcaaggatcttcatcatccttgctagggaggagggcgaggcgagccggggcctgccttcgcgtgggccggcgtcccgcttcttcctccagattctgggggtggaaaccatcctccagctctgcgaaggaggcgccctctagccatgccggggaaggcgaactgttgcttcccagctagggtgcaacattccgtcctttgtccgggcgatggtggctagccgcaccggggggtctccctacacgtcgtacgccgcgagggcggtactcgtgttctgggacgatcccattctcgtttttgtggcgaggacgggagtgaggacctgccggtgcgctttggggcggccggcgcccgctggtgcggtgttggtgggcaggtggacgtcaccgtcggtgctgaggtggtggcggctggagaagtcttttccactgacgagactgtcagcgccacccgcagaccgacctctggctctttggctttaatatctggttcgtgtcccttgagtggggacgtgaacgagagccttccg

SEQ ID NO: 194406 - DNA, 227 bp, Arabidopsis thaliana landsberg
gtctggcgcaccaggactcgtcggtgtgccaccggactgtgtctggtgcaccacggagcagtgtccggtgcaccagggacttcaactccgaactgctgcaccttcgggaattctggaggccgctctgttataattcaccggactgtccgatggcgcacggacagtgtccggtgtgccagcggagcaacgactacctcgcgccaatggtcgtctgcagcaggcattaa

SEQ ID NO: 194407 - DNA, 127 bp, Arabidopsis thaliana landsberg
atgggctctggccacgcgagtagtggttcggtggtgatggcgagcggcgaagctcgcaacgctcaggcgagcaccgacggacaaagcttgggcaggattcacgggagcgcgaggagtgagaccgagg

SEQ ID NO: 194408 - DNA, 63 bp, Arabidopsis thaliana landsberg
agtagcagaatcgcaggaaaaaagagtcgcacaatcgctagagaagacgacaggaatacataa

SEQ ID NO: 194409 - DNA, 211 bp, Arabidopsis thaliana landsberg
aatattttggtggaggatttgtttggatgaggcccagatggtggagagcaatgcagctgctgcaacagagatggcgttgagattatacaccaaacaccgttggtgtatcaccggaactcctatacaacgcaaacttgatgacttatttggactattgaagtttcttaaagcaaatcctttcgatgtttcagatggtggattgaagttataa

SEQ ID NO: 194410 - DNA, 666 bp, Arabidopsis thaliana landsberg
atgttatttggctggactacgcatggtcgattatcttgtccatattgtcaggataatactgatgcatttcagttaaaacatggtaggaaaacaagttggtttgcctgtcacagacgcttcttacacgcttcacatccatatcgtcgcaacaaaaagatgtttaagaagaataaagttgttgaagaagatccaccctcggagttagacagtcataacctcttacatcaactacgggattttggtgttgagaagacaaaatattgtggtggcagtgtgcatatcgcggttgatggttatggagagtaccacaattggcataaacatagtattttctgggaattaccgtactggaaagatcttttgttgagacataaccttggtctttgctttacattttcaggaagttccatagtcaaaggaaagcgctatggatttggtagattgtttgctgacgggtactcatcattcacaattccaagctagaccgctgcattacttaaagagcttcagacaatcaaggaatgcaataaatatcttatggaatgcaagaagcgcattcttcaacaattaccgcaaattcaaccaccgggttgtccgacaattgagaaagagactacgaacaataggaacacaagcatcgatgacgacgacgagactcaagggtag

SEQ ID NO: 194411 - DNA, 339 bp, Arabidopsis thaliana landsberg
atgacagactttcgtgcggtgtgtctaagggagccatctacaaaagacaccgcaagcataagagtgagaacagaactaatatgaccagcaagtaatgaaccataaataaatgaaggattagaatgaaacacagtttatcagcaaggtataatatatagtagaacataggtttggtcgatatgaccaacttttgaagggataccaaagtcaaggcagggacataggtctataatccttagaatgaccattctactctaggttagcggtcctacagtcagcacgactttgataccacctatgtcacacccggttttagaaggcaaaccgaatgcgaaccat

SEQ ID NO: 194412 - DNA, 960 bp, Arabidopsis thaliana landsberg
gcaatagtggaggatcacggaactcaacatcaacttgaggcaatagtggaggaggatcacgagactcaagaagatgaaacacgctatgatgagtctatggataattctgataggggggaacagtatgttgagtcgccacctgctgtagaaccgggtatgtttaaaaaaaaatgggaagacggaattgggttgaccttacgtcaagaatttccaaacaaggcagcattgcacgaggtggtggatagagctgcatttgctaacagttttggttatgtgattaagaagtcggataaggagcgctatgtcctaaagtgtgccaaagagagctgttcttggcgtttacgagcgtccaatatcagtaatactgatatattctcgattagaaggtacaataagatgcatagttgcactcggctaagaaaaggtagtagtaggctcaggaaaagaaaaggcaacccacaattagtcgcagctctccttcatgatcattttccgggacagttggaaactccggttccaagaattatcatggagctagttcagacgaaattaggtgtgaaactatcatacttgacagcgctaagggggaaatatcatgcgatttatgatttaaaaggtagcccggaagaaagctacaaggatatcaattgttatttatacatgttgaagaaggtaaatgatggtacagttacttatctgaaattggatgagaatgataaatttcagtacgtattcgtagctttgggagctagcattgaaggttttagagtgatgaggaaagttttaattgtggatgcaacacatttgaagaacggatatggcggagtgctagtgtttgcctcggctcaagatcctaaccgtcaccattacatcatagcgtttgccgtactcgacggtgagaatgatgctagttgggagtggtttttcgagaagctaaaaacggttgtacccgatacttaa

SEQ ID NO: 194413 - DNA, 345 bp, Arabidopsis thaliana landsberg
accgtcgccgatgacccgctcggccgcgaccacatcggctacttcccgcgcatgaccgagcccgaggcgtggcaagccgggcgcggcgtgtggaatatgaaccggacccgggcaagctccgagcggttcgccctgatcaccggccagggcaaggtagccgctgttgcgcaggtcaagggcgtgacccagcacgacgacaggatcgccctagagggcgacccgctgaccgccgggcacccggtcatgcgacgcctacatcgggcggcgggacccgctgcccacccagtcgcagaactcggtcacggacgggagcctgcccgaggaacccgagccccgcagccgccc

SEQ ID NO: 194414 - DNA, 129 bp, Arabidopsis thaliana landsberg
gcccaatatagcttcatttccattattcgtctgacccaaccagaatctgctgcatcaaaagcattatatcgagacctctgtagcaggatttgggttggccccagaagagatacttttacctacgcttga

SEQ ID NO: 194415 - DNA, 71 bp, Arabidopsis thaliana landsberg
ttgaatacgagcatgtccatcacaattcggataccgtcagccttaatgaggtatggctgcaagacttgtga

SEQ ID NO: 194416 - DNA, 948 bp, Arabidopsis thaliana landsberg
atgcaaacaataattcttcgcaaaaacttcaacagacggctgcccgccatacgaagtcgtcgcccagacatacttcgccagcgccaccatggcattcggtgtcagctgatgtatctgaacattgaatctacgcaggacttcgccgacaaaccggtgcgcaggcaagcggagaccggcggcgaagaacgcctcgaaaacaaccaactcaccctccggctcggggacttcctccgtccccggagcacgagcaactccgccgccaaagtaacccaaccgctgcatatcctgcacgcggaccgacgacatccgtgacacgccaaaatcaacagaatcgccggcgcgcaaatcctccgccatcaaactacccagcgtctcctcagacgaggcggcgccgacggcgagggatcggccggcggcgtagcggcagcggaagaagacgaggacggcatcgctacgtaccgtcgacggcggcgagcggtctgcttcactcgagccagatctccggcgaacaagagcacggcaggtagacgagcagcaaggcggcgaaaagggcggctagggttttcacggagcgcggaaagtgaagttcaaaaagcaccgacccccgcccccttttatagacaggggcgacgcttcgggaaacccgcaatccaacagtacgccgtcaatcaacggtcacgtcaaaaacccccgcggaaccacttcgagcgagggcaacgactccgccatctagcgatgtcttcggcaccaggtgacttagtcgaactggtccctcggagggcaaatgttggggcgaaggcaaagacgccacccttcgctcgaggccttcgctgcagccgccggtctgacagagacaagacgggcagggacacccttcgctggattcggcacgttgacgaaggcctgcggcgacgtcttcccgcggcgcgctgtcacacccggttttag

SEQ ID NO: 194417 - DNA, 223 bp, Arabidopsis thaliana landsberg
atgcggttcaccggcgaccgcacgaccggctggctgctgggcgtccagttgttcggccacaaggacaccgcggtcgccaagcgaatcgatatcgccgccaccgccatcttcgcgggcatgactgtcgatgagatcagcgacctcgacctggcctacaccccgccgctcggctcgccgtgggacgccatccaggccggcgcgcaggcgtggacccgcgaggcgg

SEQ ID NO: 194418 - DNA, 106 bp, Arabidopsis thaliana landsberg
cagcgagcccttttcactgtcagatgccaaagtagacattccatccggatactccattaataaagctcttaaagtcgagaaaaatccagaatttagaagcatctga

SEQ ID NO: 194419 - DNA, 154 bp, Arabidopsis thaliana landsberg
gtgctctcagtacaccggacagtccggtgaattatagcggggtcgcctcaggaaattcccgaaggtggcgagtttctgttaggagtccgtctggtgcacggacagtgtccggtggtagcacggatcactgtccggtggcacaccggacagtccg

SEQ ID NO: 194420 - DNA, 114 bp, Arabidopsis thaliana landsberg
atggaccgcatcatgctgtctcgcccaccccttcccgccccgacccatgccgctgcgggcgccgacggtgacttcctcgagctcgacgtgctctggcccgcctccccttccgcg

SEQ ID NO: 194421 - DNA, 244 bp, Arabidopsis thaliana landsberg
ttctggtcaagttgttcagaacaactgcaacaacactaactgctgtgcgtatgatctcgtgttaaagaaagttaattgtgaccgttgttgcggttatagcatacattacacccctcacatcaccattgctatattcttccacctgtttggttgctattgggctacacagttcttcattgcatcttctgcgacagtgattgctggctctgttgcctcctattattgggctcaaggggaagcatcg

SEQ ID NO: 194422 - DNA, 512 bp, Arabidopsis thaliana landsberg
cttatccatgaaatcatcgaagctttcgagaatcatcacggtgaagaaaactctgcttctcggagcaaatctaagagaggtaagaagaaagagaaaccgggtcgtcgggtcactgattcggatagtaaaccggctcttcgggtcacggataatggtgataaggattctaaacccgtcgtggagccaatgaacgagaccactgtttccgagagtagccacgtgtcgtcaccagttagattgagtgaagctgaggtggcagaaggagaaccggaggatgagattgttgttgaagaagatggacaagaagaagaatcgacggtggtggtttttccggcggcggcgagtaatgtgacgggacacaaagggttggcgaggaaggtattgccggacgtgttgggtttgttccattccaatttttggaggctttggaatccgaacgcgtaaaagcatcgaccggaaaaaagttatgctttttttaatttttttgttgttgctgttttcaggaaaaataa

SEQ ID NO: 194423 - DNA, 711 bp, Arabidopsis thaliana landsberg
atggaagacccttacagagaattgattgggaggttactgtatctttgtgttacaagaccggacattacacttgcagtccataatctcagtcaattcttatcttgcccaacgaatgttcatttgcatgcggcacatcaggttttgaaatacctaaagaacaatccaggtcaaggtttgttttcctctgcaggaacagaattgtacttaaatggctttgctgatgctgattggggaacatgcttggactccagaagatcagtaagtggtgtgtgtgtatttcttggcacttctctgattacttggaaatctaaaaagcaggaagtagccagtggaagtagcacagaagcagagtacaggagtatggcagtagcgactaaggaattgttgtggttagctcaaatgctgaaagacttacatgtggagatggagtttcaggttaagctcttttgcgataataaatcggctatgcatattgcaaataactcggtgttccatgagcgagctaaacacgttgaaatcgactgtcatactacacgagatagagtcaaaaatggcttcttgaaggttcttcatgttgatacagagaaccaacttactgatattctgactaaggcgcttcaaccaggtccatttcggtctgtccttggtcgtctatcagtgtcaagcctcttccttcctcagaaaggtcaagctatacaggattcggcttga

SEQ ID NO: 194424 - DNA, 1091 bp, Arabidopsis thaliana landsberg
atggagcattctggaggaaatcagagaatttatgctactgatgaaatccggagacgaaaatgcacgtaggtgtcgagcgacaccaatacctgacggcaattttgagacgcaacttatgtatgttttgaagatttccaaatttggcccagaactttttcctatgtttaatgaaggcccatcacgtgagaagattcttcttaactctattcttctcttgttttattcattgatttcttattcaatcatgttttgttcttctatgatcatgcttgagtagttttcttgttaggtttagggtttctcattagggatttagaatatttagtagattgtccaccttgctagcttttctgttaggattcttcatctttaattgttcttaatgctagttcttgagtagctaactagaacttgaatccagacaataggtatgcccaccataggtatctgtagttcgatctattatttgataagtcttgtttataggtgtgtaataagaatcggcctatctactaaggtgaacaattgaactcgtttagaatgcatgtttaggttaaagctctcttggcttctccgttttttattttctatagacatagggagtttcggggaacaccaccggttattccataattagagtttgagtttaagaatggttcgataacaacctagctttcattagatctactaaccaatagttttctgagaataccctgttcctacctctttatttaatcgtttacaaccaatgaatctgctgttttcttactttgttttcttataatttcaatcataccctgctagcttaatcttgacattgaattcattgtgtgaacaaatgaactttgtggaaatcgatccttaaatactgcaattgatctcttatttgagagagtagttcttatggtaatttgaaccttatcagatttggcgccgttgccaaagttcttgggaatcaccattgagtttaatttacagatttcgtctagtttttacttttactttgttactcacgcgtttcttgtttttttcttttctgtgtttcaggtgtatgcctaggcaaacaaggagcacataacagaaggagctga

SEQ ID NO: 194425 - DNA, 20 bp, Arabidopsis thaliana landsberg
gaaaaaccctagaaatttaa

SEQ ID NO: 194426 - DNA, 42 bp, Arabidopsis thaliana landsberg
atgtcgcaggacgtaatttcgtctcatgagcagctctccatg

SEQ ID NO: 194427 - DNA, 841 bp, Arabidopsis thaliana landsberg
gatgattcaaaaattatgaaatggctgcaagataattttagagccaagaagtggcatacatttttgactgggttattggacattattaaaggcattgaaggtagaattactgaacgcatggaaggtaaaattggggaagcaaggtctagatctggtagaaagaggaagaaaccagaagaagagctcaaaaactgtgcgtgtctgaggacgaaagtgaataagatacgacaacagatccattcaggtggaatggtttttacctttgttgaaggtgcgtttgtgactgccctcagggaggggcattgggttttactagatgaagtgaacttagccccaccagagatattgggcaggctgattggtgttcttgaaggagtgagaggatcactttgtttagctgagagaggggatgtaatgggcattcccagacatttgaatttccgtttgtttgcttgtatgaatccagccacagatgctggtaagcgagacttgccattctcattccgaagcagatttacagagtatgctgtggatgatgacatatgtgatgatgacctggagatattcgtgagacgatttttaggtggacgtggatctgacagtaagttagtagccaacattgtttggttttacaaagaagctaaaaggttatctgaagaaagcttgcaggatggtgctaatcagaagccacagtacagcttaaggtctctataccgtgcgctagaatatgcgataaaagcagaagctattggtggttttcagaaagcattatatgatggattttccatgtttttcctctccttattggatgcttccagtgctaagatcgtggaaccgataa

SEQ ID NO: 194428 - DNA, 145 bp, Arabidopsis thaliana landsberg
atgcattttgatgcatgttttcgagatataagtaagtggggatgtaccattgattgtacgaacacatttccattcgtgtgcctcgattgcatctccattgtcaccaccctcatagaaaccatcacccctgacatcattaaccagg

SEQ ID NO: 194429 - DNA, 1096 bp, Arabidopsis thaliana landsberg
tacaataagagagtcttgcttttacgagatagtgaacgaagcaggaatcaatcttttcaagttcccagaactcgttgcggagaaaaaaccatcgccagagaggatcttcaggctgatggatctctatgcagcaatctctgaccttagaccagacatagaactgatattccactttgactcagtagctgctgttaaaactctggtcctctcatcgctgaagaaactcaaggactcaatctacacaagtctcatggaatttgagtcaacaatacaaaaggattcttctaaagcactaactgcaggaggagggattcacaagctgactagatcaaccatgagtttcatatcatctctttctgaatacagccgtgtgttatcagagattcttgcagagcatccacttaagaaaaacacacgtatgctagaatcttatttcacagctccaatcttagaagatgaacacaacaaccacgcagtctcggtccatctagcttggctcatcttggttttcctatgcaaactagatatcaaagcagagagttacaaggatgtttccctctcttacctcttcctagtgaacaacattcagtttgtggttgataccgttcgttcaacacacctcaggaacctcctcggagacgactggctcacaaagcacgaagcaaaactcagaagctacgctgcaaactacgagatcgcagcgtgggccaatgtatacatatctttaccagagaaaacaagtagcagactatcaccagaggaagccaaaacacatttcaagaggtttcacgcggtattcgaagaagcttatatgaaacaatcatcatgtgtgataacagatgcaaaacttaggaaagagctaaaagtttccatagcaaagaaaatagtaccggaatacagagagttttacggtaagtacttgccaacgctgagtaaggagagaaacatagagatgctggtgagctttaagcctgataacttggagaactatctctcggatttgttccatggaacaccaatacttagtggctcttcttcttcttcttcctctttgtcttcttcatcttgtatctcacttggatgtgtaagaaactaa

SEQ ID NO: 194430 - DNA, 442 bp, Arabidopsis thaliana landsberg
acggtatgttgaactggaggcaaaatcaaaggcagacataaaagtgcttgtcagagaggtcaaatccctgagacgttcacatatggaaatggaaaaggaactgactcgatctctgacagagaagtctgacactgaggtaaatcttaagcttgtaaataaaaagcattatattattgcttgcatcatccgcttgtggtaaatgtatatgatcctacagaaagaacatcaaaacataaaacatgtttaattttttcagaaactcctccaacaggaaaggataatagtcgagaacacgctagaagcaagaagaaggctgtatagtgactgtaaaattctccacgacaggcttaaagtgaacaacacaaacttgtcaatggatgagtccagtaacaacagagaagacttatctgaagtatcaaatgccttgcaagatcagattgag

SEQ ID NO: 194431 - DNA, 465 bp, Arabidopsis thaliana landsberg
atgaaccattctaggcgccatcccttgatgctgtccttgagtgggatgtcgaggtagtcagtctttctcccacagcgcatctccaaactcgcgcccccaccagctggtgctgccctccagccatcctaggccgacagtggtacaaatacttccaaaggccatagtgaggcaaaacaccacggtaggcttcacataaatgaacaaaaatggagacttgcagaatggaattgggattcagatgggtcagattcaagtgatagaaatcaaggagaccgcggaagacaggagaaatgggaagagcaagaccgtggataagacaaggaactgtacatgacagattcgtgggtgtcttttgtcggaacaatgagcccacgacagatccgtcgagaacgagagctccttcggaggaagaactccgatggctacgagatgagaacgtcggattcagatacaacagacatatga

SEQ ID NO: 194432 - DNA, 343 bp, Arabidopsis thaliana landsberg
gtcatcatcaaccttgagcagggaccatgatacaagacatcattacattaatcagcaacaccttcagaacgttcccattacgagctacggtttttggcatggcaacagaattcaaaccgggctcacatctttgccagagtcggccaagttgcttgcaagttgccctgaagcattttccacgcatctaaagcagcaagttggtaacagcaaagagattctggtggatgttaatggtggaattttgagctttggtaagcataacgaagatagagctgagtcctcaagcgctaaggatgaaggtaacataggaggggtaaatggtgtagcagaggcagccacgtga

SEQ ID NO: 194433 - DNA, 66 bp, Arabidopsis thaliana landsberg
aatattgcgaaggatgagtttgaaaccaattttgtctcagccgtggttgctcctggagaaattggg

SEQ ID NO: 194434 - DNA, 31 bp, Arabidopsis thaliana landsberg
atgaattcagtttacaatggtgaagacgacg

SEQ ID NO: 194435 - DNA, 247 bp, Arabidopsis thaliana landsberg
cattactactcgggtcgggaagtgggcataacctgcgacgcggagtcttgtgcggatctttttcgcaaaatcagctacgggctgattccttttcccgaggtcaaggaattaaaggagatgaaggcctttaccgacgttgcgaggaagacgttcgatgtatgtctttatttctttttgttttttttgatggccgagatgcttccttgactttttccctcttttctcgctttgttaggctgatggctag

SEQ ID NO: 194436 - DNA, 129 bp, Arabidopsis thaliana landsberg
aatgggacctcaagtatgtggactcctccagggctaaacgaatcaggaagcagttattaccgcttatactcgggtcctcagaatcagcagtcagagagtttcagacgtagccaacaagatttactttga

SEQ ID NO: 194437 - DNA, 2236 bp, Arabidopsis thaliana landsberg
ggtctctgctcagtcaaactgcaaaaacgagttgaagaaatcactgaagccgtgtttcagctacctgacttcttcctatccttccttgcctgatgattcggattgttgtccttcgttgctggacatatccaagacttctgttgactgtttttgtcaatacttgaacagtggaggctctattctcgatatcaatgctaacttcatacaagctcgtcgactgccagagatctgtggcgttgacccttatcttgctagtgtgtgtaacgaaggtaagaatttcttaacatcaatttatgaagaaacaccaatcctatagtatgtagtctttatgtatatagtgaatttatgttacaggagatggattgaaaaatataatagtaaggtgatggagttgcatgagatggagaactggttaggaggacatcaaacctagcatgtgtcacaaaccgaaagtatttgaactgatgtaatcgttgtttgtgtttattgtgttgaacgagtctttgtttcagttgtgtcaataatgtgtgtcttcattgggttaaggagccagcattttaactttctcattcctggtttataggagttacaactccctctctttgtacattctattcaagatagtgaaaaagccaaaaagaggcaattttaactgcccaaagaaaagttactctctattttgtgcgatgtaatttatgctgtatgatttcttactccctaaagtgatatttctttgtaccaacggagatctttttaccgtttacaataatcattaacttccataacacaatttgagaaggtagtaatcgaaatgttttgggttcaaactcaagagccggagatagtactacaaaaagatatccaaaaggaaacaaagcaaacaatctatcgttatgaaacataaagacctaatgtgagataagctcttgaagttagatataagaagaataaactttcaaggaatgtatgcaatgaatgtttttaatgattttatccccttgttttcattatcttgatgcattaacacaccatttaaacttcttcaagatagcctttgcattgagttcatccattttaggtgttggagtgagaaccataaagaagagaggttttagaggatatttggttcttaaaagaccaaacaatgacggaatatgaaggaaagaacaagagagatgatatgatattatccataaacaatatgaagtacttgaaagatcacgtcatatgaagactttcctttgtgatattgttttcgagcccttcatcaaagtcataggaaattgaattggctgttccaacggtggtgatttcggatcaaacggaatagcggatcaaaagtaatagccaaaattaaaaataggctctcggacatgacaaaacaatcaggcctaaacgaacatgaggagatgataatacgtttttttattcatcagcagcattcattttgtcaaacaaaaaaataaataatacaaaacacgttatattatacaataatcatctcatgttccttaatcaaaccaaataacatacaaaataacattgcgaaacatattgtattgttatatagaatgatgctgatgaatataaaaaatgtattacaagacgtggttaagatgatgtccactttgtagccaaaaccaaacaaaattgacattaaaaattatagtaatacgaactgtattgtatttaaattattatttaataatggctacaagttggctgttggttaagtcaaggaaaaataacagctaattgttcatattataaaacaaaattgaacacaaaacacacagtattatattatatatagtaccaattagctagtaagactctgaaaaaccaaacgaatctgaaaagatcataacaaaactcaaaagattcttctccaaccacgtatttcatcaaggaaacatgaagataggagtggttttagtgttgcttacagttttcgtggctgtgatgtcttctacaagcgtctctgctcagtcggacgaggacgagtgcttgaaagagactgggcagatgcagttgaattgtttcccctacctaactgataatcgtatccatactcctagtttcgcgtgttgttctgaggtgtatacagtaggcaagacatatgttgactgcttttgtcaattcatcaacaatggaggccctagcttcggtatcgttgtttcccaaaaacttcttgatctgccagagctttgtggcgtttatggtgcctgtggcaacg

SEQ ID NO: 194438 - DNA, 361 bp, Arabidopsis thaliana landsberg
atgccgcttgatactccaccagtttttgtctctaatgatcaacagttgcaatgttatccaaggttgatgaaaatcggccacctacgtctttgtgtggagtttacggcgaaagagccaaggggtattagtcggaaggacggatccagaggaaggatgaaacggccaatgggttctgactcaagagtagaatctagattcgaagttccgggtagggggtttgaagatttatgttaccattatcaagacgatgaggcaagtgacgatgaagcatgtaacgaagaagctgctgacgaagaagtaggtgacgaagaaaaagaagataatttttctagccggtttgatgttttcgacgactctgacg

SEQ ID NO: 194439 - DNA, 171 bp, Arabidopsis thaliana landsberg
atgtcactcatgtcaagcactctagctcaccgacgaatcgctgatgcagctgagaaattcggagccaagaggctcatggctttcagcttaggagagactcgcgtgatcgtcacgtgcaatcccgacgtagcgaaagagattctgaatagcccggtttttgctgatcgaccg

SEQ ID NO: 194440 - DNA, 534 bp, Arabidopsis thaliana landsberg
cccggttcttcgatcaagccgttcgtatatgccgtggccctgtccaaagatttcacgccgccctcgatcattgatgacggccctatcagtatgatgggcggcgacggcaagatgtggacgccgtctaactatgaacatgactatctcggtatgcagccgatccggcgcggtctggaattgtcgcgcaatctgatgacggtgcgcctggcgcaaaaggtcggcatcaagccggtgacccagggtatcgttaatttcggtgttctcgacaagatgccgtcggaaatgtcgatggtgctcggcgccggcgaagttaatccgtaccgtctgaccaacgcctattcgatctttgtcaatggcggccgcaaggtgaaaccgcacctgatcgacgaggtgcaggatcgtaatggcaagattgtttacaaggcggatgaacgcaattgtccggccgcctgtacggccgatttcgacggcctggaaagcccgagtcagtcaccccagggcgatgtggtgctcgatccgatcacggcttatgag

SEQ ID NO: 194441 - DNA, 86 bp, Arabidopsis thaliana landsberg
agatcgctttgatttttgtttatcagttcgttgtttggtcaaatcgaaagctcgatcaggatttgaagctcaatcgggatctaaag

SEQ ID NO: 194442 - DNA, 400 bp, Arabidopsis thaliana landsberg
atggaaaaaagaggtttcacttttacatcaatcctcgttcactctctgtggatcactcttactggaatcctcttgtttagtctctccaccaccaaaaaccacaactttggttacgtcaaattcttttctgtaaccggaaccttacttataaccttgccttggataatccaacttttggtcacctctgtggtaatatttcttcataagaccaaaggttacaacttcatgtggattgttcagtcaccaaaatccaaagagaatcatcatcacacgaatgtcgcaacaactactaccactgcttcttcttgttcatctcctctttcgtctctccaggttctgaagaaaggtgatgtagatgagtacgagattaggattgtgattggtgctgatggtcctaaaa

SEQ ID NO: 194443 - DNA, 233 bp, Arabidopsis thaliana landsberg
ttccgggtctaccgttaactcaggatcaggatccgggtcttctcctgggtttaggaagagttcaggggtgaaatgtagagttagggttcgtggattgatgaagaagaagaagaaaaagactagtgggggatgtgagatctctatgcgatctggaaatgttggtgcttttgaaatgaagagtgaggtttgctcgaaaaagacgaaaactttgggtgctgcttctgcttcaaaac

SEQ ID NO: 194444 - DNA, 1113 bp, Arabidopsis thaliana landsberg
atgttggagatcgtaagtctatatttttatcatcaagaaaattttagacaaactgacttaagactaagaaaacagagacatgaacaaagttcaagaaaatgtgataaaattattagacttgcaatcttaacctaaaggaactaggacaaaactgggagaataaacacaatgaaaacaccagaaaccaaaaccaatttgaatcttcttgaaaaaatctcccgtgacaatatagatgcaagccggtccagtttcatcgtcgccaggacacaacattagggtggtctggtcatagaccaagtaactaatgccataacacttattaaaccgacataagttttatttaattgtaaaatcaaaaccctaatccacatttgtaatcccaaaccaatataaaattttatttaattgtaaaatctaaaacctaattcatatatataaactcaaaaccgatatataatttcgtttgattataaagttcaaattctacagataattaactttatttaattaaaaatctacaaattttgttttctcaaaattattgatttaaattaaaggagtgaatacgaaggttcaaccccaatatttttcctatatacgggggaaaacgtttcaacgtttctattaactaatttaatttggttagtcaatagactaaaccggcgcatacacacattggataagagataaaaagaggcaccactcgcctccacagaaacctcatggcatataaaacattatcccaattaaggacccaacctttttttttggttctgtttaatatcttattgtttaaaaaagaagaacaagactatgggaagtgtacagttgagtggttccggcctagtagcttctctacctgcaaatcatagctttagccacaagaccaaacttaataagccaaattcgtacttctttcgctcaaaacacaatgccgcaagaaccaaaaccgtccgagccataagcaccgcaccagcgagccagcctccagccgctgatgagcccgacgaacctcctgctgtcgattttgcgttcgtccatgtaagggatgtttactcttgacagattatctacactcttatcattagctacattggtaacaaggatgaataa

SEQ ID NO: 194445 - DNA, 89 bp, Arabidopsis thaliana landsberg
cgtcgctgttaccaccggaggaggaggcgtcgccggtgaacaagattttccggaaaagagttgtccctgtggagttggtatctgtttga

SEQ ID NO: 194446 - DNA, 1217 bp, Arabidopsis thaliana landsberg
gttatcaatggaaaagttaatcttgttttagagaattgggattcttcactggcaatcactgcacgagaggataggttatcccgtgaaggattctccgagtcagttggggacagaaagagggtcaggatcacaaaggatggcaatttcttgggacgaaatgcgtttaagatttcttttcctcctggttttaggcctaacgctagttatttagaggaatttgagaagtggcagaaaatggaattcccatctccttatcttaatgcgagaagatttgatgctgcagatcctaaagctaggaaacgagttgtagctgtgcttcatgaactgctcagtttaacaatggagaaaagagtgacatgcgctcaattggatgcattccactctgagtatctgcttccatcaagactaatactttgcttgataaagcatcaagggatcttctacattactaacaaaggagcaaggggtacggtatttctcaaagatgcttatgctggttccaatttgattgagaaatgcccattgctattgttccatgatagatttgttgcactctgtggtcggaaagaagtcaatttatctaatgaaatgcagtcttcaagtgttttctcctaatcttacatcaaaccagagatgtgtacccccaaggcatattacccattgattatgttccagcaaataagattcagtttataggactctgaaccttataaacatttaactgtatcatttcttcttaccgtcagtgtcttctcgtgtgaagaaatgaaacgtacttgttaagatattaaagttttcaccaacaaacagaagcgtaaatactatctggtgattgaggatgctgaaagccagaacgtgtcatagcgtctggaatggtacccaagggagatgtgactggcttattgactaggtactgtgaatgtgatttgaactatctcgtccatgtggaggttgtggatgcagttagtattataatacacttgtttttatctctgtgtacacgactctcctgatctcctttctggagaaaacgttaacggaatctttttcgtgtttacacacgacggaaaatttatttgagtgcagggaaagggggtccagaactcatgtggcttgtgaaggcatcatgggaaaagagccaaagggaaaaacaattaagtcacactccacaatcccccattttagacctgagtcgcattcatgctcaaaaacaaaag

SEQ ID NO: 194447 - DNA, 99 bp, Arabidopsis thaliana landsberg
ctgtctcttagttcagacattgtgacactgagagagatagatgaaggaaacgcagacgcaatattgttcgaaaacacagatgtagtgtttggcgtttaa

SEQ ID NO: 194448 - DNA, 174 bp, Arabidopsis thaliana landsberg
aaccggttcgcgttgccgtgctcgtagatgccaaccgagtatttccgacgttagaagaccatgtgtgcttctcgaatggttgtcaagtccgaaaaagggtttccaaacttaagcaactccaagaacttcatcgtgtaaggcccgcaatctcctgtagttgggttttgagcaacg

SEQ ID NO: 194449 - DNA, 83 bp, Arabidopsis thaliana landsberg
tttttggaacattggaaatgatgaagacttctggctcttacaacaacatcaacaagtccacgacaatggaagcttctgaatag

SEQ ID NO: 194450 - DNA, 388 bp, Arabidopsis thaliana landsberg
atggcgtcgtcgttctcgcctctgcctcatggtgtggatcttcgtcttgtctctggtcacgtgtttcattgtgtttggagcaccggaggaggctctgtccttcttccctcaccggatgtgagcaacaacggctctgttctcggtgcctcggtccctcactcgtctctcatacttcctctttgtgtttatgtgttttgttttatagaacggttctagtgactagcttgatctctttttggttgttggacttgtttgctcgtgctccctggttctagtggtggtctttatggttttttcccggatcgatcttgtgctgctctcttttgagattggtttcatccggttgaagatttgtttcgctcattgttcacagttacccctgatcgag

SEQ ID NO: 194451 - DNA, 179 bp, Arabidopsis thaliana landsberg
accgacaaacacgagaacccggcaaactgagaacgccaatcccaaccacacaacgagaaagcctagcaaccgacgtcgatccctcgacgacaacaacacctaacggaagaagccggcacgctcacaggacagacactaccgagaaccgcttgcataacatgaaaactatcagacactga

SEQ ID NO: 194452 - DNA, 321 bp, Arabidopsis thaliana landsberg
cttattgatgatggcctgatcatgatcggcgacgttttcctgggggatgactccagcggcggtgaggcgctcgatattcgagaccttcggggcggatttcttcttgacggccttcttcgccggggacttcgcgacggcctatttcacggctgccttctttgccggagcctttttggcggacttcttattagctttcctggttgccacggtctttcttcttataggcctgagttcttctcaggacaaacgaacgctgaaacgggcccgaaacaaacacaaatgcaattgagtcttcggcaaaagatacgtgatgcgccgtag

SEQ ID NO: 194453 - DNA, 1226 bp, Arabidopsis thaliana landsberg
accccagggtagtgattcacgaagcaccgttcttcccttgatttggctcacagtataccgaacatcattaggtaaccgcacacggttaacatatagagtaaggtaccagcagtcctggtcaattgcgcaaggaatcaagcatcgaagcaagtccattcaaaagatccaattaaatgtgaaaatgagctaggaaaagatggagcttcctgcagagtatggggaatccaatttagaattcagatacctgctccgcatggaaattgatttttccaatatgatcttcactggaaaagccaaatattgctttagcctagcaagagaagagatataaaaatgaaaacacatgcattagcgacattgtgtaattcaaggagatatatatatagagagcgaagtcaccttattatatgcaatgcactttgaaacctcgctcatattttcttatagaaaccactacacacgaagttattgttggttgtatgtcttccctcttcaaaacgttttacataaatgatacactaaaaaaattataaattatgtggaacttgaaatatgatatttaacgaagagtatattttactatttataagaaattatttactaagagattataaattagttatgttgttgttaagtaataatggaatatttacgttttattggttttagtgccatttatgaatttgaatgtacactaatatgatcataattaccggttacattataaagaatttattgttataatgacatgcaatttaatgtcgttttttggcttaaaagttcttattggtcttgattctggtcaaacaatatgaactttgtaaatgtagcaatttatctggtcccactgttttgattacaacaagctcagcaatcggcattttgttaaaaagtagttgtttagctctctaggtgaatatagaggaatctatgtacatggaaggatggaaccatattaaatagtcttatgtttaacaagttaacgagtggttttaattatatgaagacaaaagagattgactcatagacttagtactgtacgggtcaacaactctctttttttctaggtaagaagagatcgttgggtttatatgcaaattgtcctgagtattaaattacgtcgaagaagcgagcgtcaatcgacgaagttggctgaggaagaacagaagaagaaaaacagagaaggaagccaaaaagcagaagaggaaaatggtggtatcaactaa

SEQ ID NO: 194454 - DNA, 111 bp, Arabidopsis thaliana landsberg
ctatattctgaaactcttttcaaaatctgcctcattttggtccacgtggaattcagtggacgaaagtaccccttaaagtgggtcagcgctctaacgaagatggtgacataa

SEQ ID NO: 194455 - DNA, 124 bp, Arabidopsis thaliana landsberg
ggtcttagattattcaacattgatatgattagggagcaccccctccttgtcaagcaactcacaccattacaagatctacacgacatgacatctgcatcgccaaggcctcgctcaactcagcgcg

SEQ ID NO: 194456 - DNA, 413 bp, Arabidopsis thaliana landsberg
atgaccatcatgcgctaccggccccgcgccgcgctggaggggccggtgaccatcccggcgggcaccgagttcgcctctgtgccggtggacggcctgcgggccatattccgggcttcgttcccggtcaccctcgagcccgtggcgctgtcgagcgcccagtgggaaggcggcggcacccaggcgcggtcgctgcggctgcaattccgcctggccggcctgccgggcgcgccctgggccggcgacagcctgcggttcttcctgggcgacgcgcacgccgacgcggcgcgcctgtatctgctgctgctgcgccatgtgcgcgaagtgcgcatcagcgccgagggcggcccgctgcccgtgctgcccgccagcgccatccagccggacggcctgcaccccgacctggaactgctgcc

SEQ ID NO: 194457 - DNA, 422 bp, Arabidopsis thaliana landsberg
accgcctgcccacaaaggttagacttgcgtcttggggtcttcagctggatactacctgcaacctttgtggctatcattcggaaactcgcgatcacttattgctgtcttgtgattttgctgagtacctttggcatgctgtgagtatgagacttggcctgcagtccatcatctttgactcgtggcagcggctcattggttggctatctgtcaagaacgcaaggtcgccaccaacgctcagcaagcttgttgcgcagtctgttatttacgccatctggaagcaacgaaacaacctgcatcacaaccaagcttatgtgctgccttcagtcatcttcaaggaaatcgacagagagataaggaactccatcactgctagaagtcacagaaagcgtttcaaaccgctaatgagactatggctccactga

SEQ ID NO: 194458 - DNA, 254 bp, Arabidopsis thaliana landsberg
gttgttcccaaaagtatcaaatgcaatccgaccatttctcccgattctatcggttctcgacacagcttgctgcgttggagcaccactcgcattgaacataaactcggtcatgtctccatttggagccaccatattgttactagtaacaatgtttcatctctcagctttcctcgctggatacttccttaccggttctgtctttagaaacgctccagacgctaaagccatgcaaagaacattgtcctatgaaactg

SEQ ID NO: 194459 - DNA, 264 bp, Arabidopsis thaliana landsberg
gtctttctcactatatgtactcttgtcacaatctattttgctaaagagattccttttacaagcaacaagcccacccgcatacaagattctgcacctttgttggatgatctccagtccaaaggccttgagcattcaaaattaaataatggtactgccaatggaatcaagtatgagagagtggaacgtgatacggatgaacagtttggcaattcagagaatgagcatcaagatgagacctacgttgatggccgtggatctgtttta

SEQ ID NO: 194460 - DNA, 200 bp, Arabidopsis thaliana landsberg
ccaacttcttgtacgaacataggcacacgctaaatgaggaatcgaaaatttccttttccagaaagctaacatttttgcttagaaactttgatgaaaacgacagaaaatcgcacatgttcaaggagagtgcaattcataatgtgagttcaccttttagtcaaaccactccaagaccttcaacagtgcagatcacaccatga

SEQ ID NO: 194461 - DNA, 426 bp, Arabidopsis thaliana landsberg
cgaccaaagccggcaaaattcctccatcagtcgaagaggccgccgccgagattccccaaagagatgaagaaggcgcaaagcttcttacaacagaagaggaagccggagaaattcagcctacaaccggcgattgtgacgccgccgatttgggtcattcaaacgccgtcggaggggattcaattgacgatttttcagacccaaatgctgattcttgtgaagaagaagaagaggcaacgaatgcagttgttcaacatgatgatgcagcaaataaggtatgagagaagaccgttattttttggattaggctcgttttaggatattatgcattggtaaatgattggatttgtgcttcagataaaacaagtagtacaactagatcgtaaatttgtgaatggtcattcaggaacaagtagtacaactaggtag

SEQ ID NO: 194462 - DNA, 1078 bp, Arabidopsis thaliana landsberg
aatgattaccttcggaaactcagtgaaaagctgcattatatactgagaacttacactcgagttccaggtaataagtttttggtttcaaaattacactattttagcttaataacaaacaaattacttactaactttttttttcgatgtctttatctaaactaaacatcagcttctcaagtagttatgaatcaagcgcaatctcttcccacctcgttgccatatacgcagactacaacaaaccaccaatggatacagcaaaatacacacagaaatctcaacattcctgtgtcatcttctttgccaagtcaggtacatggtaggcaacagcttcttcctccgcagcaacagcctcaacagcctcaaatgaatcaaatccgccatgggaatctacgaccttcgcacatgcagcaacaagctcagccaccgcagccgcagcatcatccgcaaagtctgttgaaacaacctattcaacagtcctttccacaatcaagttcaagccaacaaaactctcaatcactgccaagaaatcagtttccgacacaacgggtcagttctagtcatcaaaaacagatggttctgccgtcccaaagacaagaacaagagcaagtcattaatcaactgatgaatgttccaacatcacgacctaacaacagagaccaacaaggagcttttcgggtatcatcgtctcagcagaacaatactgttggcttacatgcaatggctcaacagaagaataacctccaaagtatgactagaggtcaacaatctcaaccaatgatgtcacaacaataccgccagcaatatcccatgcagcagcagcagcctcagaacagaaacaataccaatctgtttcaagcagcatattcgttgcgccaaacacaaaacataacagatcaacagaatcagccacaacaattacagagagcaaatccatctagtatgtttcctctcttactaacttgtagatgtgatattgtttttagttctaataatgaatatctttgtagcttctcaagattctacgggaaagacggtaaatgccaatcccggggactggcaggaggagacctatcagaag

SEQ ID NO: 194463 - DNA, 388 bp, Arabidopsis thaliana landsberg
gatgtttctgtgggtggtatggacacaacatacactcttttggaatgggcaatgacagagctactatgtcaccatgagtgtctagacagactccaagaagaagttcgtatggtttgtaaagacaaatcgggtgtatcagaagaagaccttcaagacatgaaatacttaaaagctgtgattaaagagacactaaggctacatcctccacttccattgatggttcctcacgaatcaacacatgatgtcaaattaagagactaccatatacctgccggtacacatgtaatgatcaatgcttgggcaatcgggagagaggctgcgacatggggaccagacgtggaggagtttagaccagagagacatttgaattcgtatgtcgattaccgag

SEQ ID NO: 194464 - DNA, 102 bp, Arabidopsis thaliana landsberg
ccatccgatcaaaaaccaaaacccaaacgaacggtgcatatcaagggtagaaacgtagttgtaatggagatgggtccaggtgatcttggaaccattggttaa

SEQ ID NO: 194465 - DNA, 790 bp, Arabidopsis thaliana landsberg
acataaaagttggacttggacccatcatagaaacacagaaagggcggttacctttccaaaggtcagtttttttttttttttttgtctcttcagaatcccaaccttacaaactaatatcacattcaatcgaattgaagtaacatcatcacttaattatgatctacagagtaagaattcgttataccaaaaagaattagaacggcagaatcaaatctaagcttagaaacaactaaagtacaagacacttgaaacaagcagtacatttgactagaccaagattgtgtccctccacttaagttattatagacccacgactactttgactttgttttgtctgcataagatctatgtctcactattttcaagttcaaatataagctaataaacgaattcagatagtgtaacgaaaatattactttactacctgaagtacatatatatatagagagacccgagataattgatgtgtctcgaccgttacaaaactaaaagaaggtattcaaagaacgttagaactgacccgaaaaacgttggcaagagccggagctgcggcgaggaggccggcggatgtggaagcgttaacggcaacttgaacggcgagagattcaagaaaaggctccggccaaacatcgttggctccgcggcgagggcgggatggagatggggcctcgaaaacgccgccgcttccaccggctccgttgtcggaagaagaggaggaggtagacatgagacgagaggggttataagaggaacaggggaagaagaagaagcggagagaggagaaagaatg

SEQ ID NO: 194466 - DNA, 512 bp, Arabidopsis thaliana landsberg
gtgactgaatcaaagctagcaaaatttgtcgaagactttatagtaccaccaaagatgattcatgtaattgttgatggagaggtatcttttcaaattccctctttctatgtaattgttgctttggtaggatttttatttctaatctgatagtcttgctattttctgtattcaggtgaatgaagagtatatcaaaacacttggaattctgagcaagaagctgaaatttgtagaaacagatcaagcagttaaaagttccaaagcattaaaagatgtagagcctgagcttgaaaagctccggcaaaaagctatttccaaggttgttaatctactttctctgttacttgattcgtaacaattatgtctttgtttgttctgttccaatgcttccaagggcatgcacgtcgagggagcaattctcatttatttccgttttgcaggtttatgatttaattgttcaaaagcttatagccctgaggaaacccaaaacaaacattcagattcttcaacagagt

SEQ ID NO: 194467 - DNA, 538 bp, Arabidopsis thaliana landsberg
atgaatatgaaggacgggtcgagtgagagtgatgtggaggagcatgttgaggttgagaggagattggatcatgatttgagtcggtttgagatgatttatccgaattatggtggttctgagtataacaatgttttggaaaatcgagtggatgatcaggatagccatattgctcaactggaggaagagaatttaactttgaaggaaaggttgtttttgatggaaagggagttaggtgacatgaggagaagattacagtatctcgagaggcgggatatggttgctcaagatgctaacgaggaggttgtggagaatgagtctgaaagtgatggtgatgatacagggggatctgatgctcgtactagtggtgaaacaaaggagaaccatgtagctgcagaagatgtttgtatgcaggatgttgcggcaagggataatgaggctgtggtgaaggaaaacaacaataacagcaagagcgtggatgaagtgaaagcgaacaaacaatcggttggtgagggaagttctggggaaagtaaacctgaag

SEQ ID NO: 194468 - DNA, 70 bp, Arabidopsis thaliana landsberg
cgtgtgcttttactgaacgttgcgacaacggcaacaacggagtaagacgaattgtcatgagaagtagcag

SEQ ID NO: 194469 - DNA, 2894 bp, Arabidopsis thaliana landsberg
  unsure (1)..(2894): unsure at all n locations
atgaatatgaaaacatcaaagatgaagttcacaaaagagatgatagagtctatcaaagacaagctcccaaggctcagtttcctcctcctcttcctccgacaatgctacggtggttgcggcgaccggacgcatttactcccttgctccatcgccaccacttccacccgcttttggaacctctccgaccgtcccgtggagctccagattcgggtcggttcaattctaaaacgggtccacactctcaaacctggccgttccaagaagcttagacacagaagcattcacagagcttacgttgatgaccaggaaggacgtagatggctgtactacgacgacacttgtctaccgtacgtatgggttcacgagactggtacggacttgtcgaagatggtgaagcaacagtacgtgagtctcgaggatctgagggattactcggagattagggtttttaaggatttacagagaggttgtgtcgcagttgagaaaagagacagagcttctgctttgtgttgattctccttttctcatgcttcgaattaatgtcttgattttctcttttgaaacttatcgttattggttagttcatctaaattatttccaagttatattatgtgatacatgatgcatgtataactccgtctgactcttcttgaatttggatttattgggattaaacaacgtgatcacaagttgatctctttccaaaaggggtaactagatctctgaattccaaactaatcacaaaatattatttatcttcgtcggttgatatttgtggtagttgaggattatatgtagtggaaaaagcaaatattatatttactaatttagattcagtcagaagatgacattattaagttaacacaacttggttagtggtgttgttacttatagtataagtgatctttgctatgatgatctgcgaatgatttatacccaaaaattagtggtttctattnnnnnnnnnnnnnnnnnnatgcaatatttaaataaagtttcgtataattaagactatccatcctgtagtaaattctgtacgcttatttggcggacaacaaatatttagagagatcttatctttacacatttatcgatgatcaataatgtgtgtatttattttgatttttttcgttggagaaaggcaacaaaatccagtgaggtgccttgatggcaggcaaaataatgacctttcctctgatcctctcccactttgatagtccattaatcaattcactcaattgtgtcatatatccaatatccaatattcaacatttgatgcaaataatatacttactggttcaaactcaactaattagtgcaactttaatggctgacatgatatatagtaatagcattagatacgaagtttttagaaatcgatttcccgcatgagaggtaaggtatattgtagactcatagaaaaacatgtctctaatctctatagtctatagttgtagagttgacttttgagtagcataatttaattattacacacggtaagttgtgattaggtggtaaaaactatacaaagtcaaagttacgaagaaaactgaacaactaaccaattatttgatgtaaacattaacatattaattaattttctacaacaaaagtctaaaaccacattttaaacccgaactcaataccaaaaccaaaccggaaaaaagaagttttgttactcggtttaaaaagtaaaaaagagaaaagtcaaaaaagcattaacgaatcttgaacaagacatcttctagttcttcttctaccaaatcttgtttttcttcagtctctctgcttctcactgttgtgctttctgtcttgtctctgtctttcccattgtcattctctcaccaatgggaatctcctttagcaacaacaacagaagacgagacaacaataatcgtcgccacctccaccactatcctccgccgccgccttactattacctcgaccctcctcctcctcctccgccatttccaccgcattatgactataactactccaattaccatctctctccgcctctaccgccacagccacagatcaactcttgttcttacggccattaccattatcaccctcagcctcctcagtatttcaccaccgctcagcccaattggtggggcccaatgatgagaccggcgtactactgtccgtctcagccgcaaacgcatttcgtttaagccatacctggagcaacacaacgcgaagaaggtgaggaatgatgtcaatgtgcatagagatacagtgtggcttgaagagacgatctcgctcctggtcacctatctattcttccttcgtcttcgatgctcagctcgacggcaggtaatattcatcgttctgatttcaactttgatctgtgaagaatgaacattgcgtgaaatgtgattgtatatctagggttttgagattgatgatgcttacaaccataattcggacgaaataggtaaattaaggcttagcgaactattaaaggaaagatctttactcatgagaacaatctggaatcactcttccctatagaaaaggtttaaactttacatgatttgcttgatgggtttgtgaataatgatttcacggcttgatctacaatgtgttgtgtaagctttaaactcaactttagatcagaaacgtagagacggtgtccttgtaaactgatcccatctttcttcagaattggattaacctcacttatatgatttgtattgatcaatgttacttaagaatagactctcattgtgttgtcctttcgttttcagtttcactatcaccttctttgcaaaggcggaaccaaattgcaccattatcccacagtttccagaggtttattcacccacaagattccattttcagaaaggtcctggacagaagtttctgcagccttcagggacaggaactga

SEQ ID NO: 194470 - DNA, 430 bp, Arabidopsis thaliana landsberg
atcttgcttgagcaaaacgccatcgtctagcgataaatcgaaaagatccgtacgtttttgtcccgtcaacgtcatcttcgacgaagactcctccaagtacaacaacaagaacaacaaagtgtacggaaacaacgaacgtgaatatgaatccattcgtcatactctagagatccgagtcatggaagagaatcgtcgcgtaatcgaagcagctaaagaacttctgagaagttaccagaagaagaatatagaagtcgttgaagtctccgtcgaagacgaagaagaagacgacgacgacgatgcgttgagttgcacaagctctgatctgttcgagttggataatttgtcggcgataggaatcgataggtatagagaggagcttcctggtttacgaacaactcgcttgaacactaatcgtatcatttctagatga

SEQ ID NO: 194471 - DNA, 611 bp, Arabidopsis thaliana landsberg
atgattgtgtccgtgcccaacctgacaacggaatggacgaggaacaaaggtatgatcaatgcatctccttatgaaaagatattaggaaagtaacttaagcaagcaaaatatagattaaaaaacaccaatttgcattattgcttcatgttggtgcttgagcattaaaaacaacaaagaattcctcgaaatagtaacatcagcgtaagggtagtttatgttagtgagtaggtgtgttcttgtgaacttcaattgatttggtctttatagagtacacattattttgtattttggctcttacccggttaagttggataacggagagccatagaaagcttttgggcatatgcatcaattgaatgtacccaaatgtgccttacctacccgtgcatgagcttgcaccaatactgttaaagtttacaagaaaatatgagaacttactttcagtagaagttgctattcaattgtataatctgaaactcaatagacttctcccttgctctgttttttgttactgcagacaaaagcgtagacgcatagaagttgctttgatagagtatcgtgaaactcttgaggaacaggggatgaaaaaccccaagaagattctgagaaag

SEQ ID NO: 194472 - DNA, 2481 bp, Arabidopsis thaliana landsberg
ctgggatattaaggggttctaggagagatcgattgttgagtaaattcgtggagaatgaatttgagaagattgaccggctcatggaattatatttgaggtaatagaaatgttctgtttctcttcagtagtctaccattttaagcattttgattaaaaagctaaggcttctatatggtgaacgcgatggtaaaatgcagttacctcaaagttgtgtttcctctctcattattgttttgcacttggcagatactctgatagggttagatcagaggcggaaaggttagaccagcttgagcttgatgaccttgaggtaatttcacttttatcattttcatattttgatgttttcattctgagcttgaatctgtttatgaactgatttcactgttttacttttcagttggatgaagatgagaaatataatcggaagctagaatcaggtctctacagtcttcaagttcgattaagcttcatttatccagtttcatgtccgtttgggaaatggcaaatgtgcctaatatgtgtatatatactacattacacacttattcaggttacaaattccccgctaaggtttcctgtaacaaaaaggtagcatcatgagtaatatagaattatttagttagaccggggtctctagggtttcacctataccgctatcagaacacctaactataccaagcaatctacaatcaacaagcaagactcaatcgacaatgcacctcctatataagacttaatctacacttctacactcttcctactttaggcctctacgaattcagatccttccccccccccccaatgccccacacactcctagacacatacagtctacaagagatcacattcctcactactacatcgtcatgtagtgcctggtcggttgcaagccagccccgagccttcgtaagccataacgttacggagtttcacgcaacacacaacaaacggatggactatcatgattcgcctaacaatagttaaccccctattgctatacaataacacgcataaccctattcctatgctatccgatagcataacggttacgctaacaaacaggcagcataacggttacacaatcgttaagcctaatttcataaccaatcaatcactcaaccaagcatatatgattatgaaataatactaagtataaactagcaacctgatgcataatttaaacataataaataaacccaatccgtgtgctacttcacacggctcggttactcacaaagctcggcagaaggttttggaccgtgaacttctccgatggttctctgttttcccgaaacatttctaagtggtttctattcgaggtgtaaattctaagggtcgaaaataggctatttataggttttcgggcgagttggttaggtgaggtgctgggggacacttgtcacggctgtcgccaccaagccacgctcgatgggcgacacctggactggacacgttgtgggagcgacacccagtcaccgcctagctgtcggcaaaacgtcctcgaccacacattaagtcggcccgccttatgctcctacgtggctggtcaaggaccactcaattttggcggctagacatggccgattttcaaccacagaaaaccggagcagattacccacctgctcgccgccacaagctggtcgatgacgtggccaactctcagcctcgcctttaccgcacacgccggtcatagtcgagcacacgtccgccttggccgaactcacaccaccacgggttgcccacacttcgtccttagtcacgccacagagaaggtccttaatccggtttctcgcaacggcctaacttcaaattctcgcccatctctaagttttcttccccctaaccatcctaagctaatcctaaggtttcgtttcccacagagtcgaagtcacttgatttgccttggaacatgactcgtggaacagatgaattatcgtttacctcggttttaagctttcccgtccatagtccacgtacggggcattatagtggtcgtggcagaaaatcttctaagcaagacaaaatcctataaaatccaactgggattcgaaggacccatcaatcattgacaaatgaggaggaaactattgtttcggttgacatgaccaggctatcccgtcgttagatgctaaattggctgctcaatacaaaaagatcatgaaaggtgtgactgattggtttcatgcaaacactttgatatctgtagagaatcagaaaaatggctcttttgacaatggcaaagaagttcgtgctgtgaataggaaagggttacaggttcttgagccccaaactaatcctctacccatctccgatggagacgatgattttgacagattctttcctctttgtcggtcgagtcgttgttcctctcgcgttgacaaagctgccattcgtgacacccaagtgcccgacgagggattgggattttataataggtttttgctcaattatcataaaacactaatcatgtcgttgtag

SEQ ID NO: 194473 - DNA, 119 bp, Arabidopsis thaliana landsberg
acacaacaaattaattacagagacagttacagaggaaaaagatctatgacggaaactggtgatgatcttgctacggtgaagaagccaatcccatttctcgttatcttcaaagatttaag

SEQ ID NO: 194474 - DNA, 108 bp, Arabidopsis thaliana landsberg
agtctccgccagaaccgccagacccaccagacctaccagatcctcttcctcatatcaatattttttccgacgtatctcatgctcaaccgcatctttccacctttctga

SEQ ID NO: 194475 - DNA, 138 bp, Arabidopsis thaliana landsberg
ccaaatattacggtggctgaaagaaaccaactcaatgaagaagagattaaaggcattgtcataactccaacgaagactaatgagtttggtctttcccttggaaatgacggtgcagagctcggatacaactaccaataa

SEQ ID NO: 194476 - DNA, 282 bp, Arabidopsis thaliana landsberg
  unsure (1)..(282): unsure at all n locations
ctactgacctcggtgacagatagagaaccatcaagagaaggtaaatcaatcatatctctaaaagcgaatatgtttttccttaactcaaccatcaaaatgaaatgtgctgagcatttcggcgaagaaccctccanagtgttctttctaggtgtattcgctttcgtctttgagttctttactgacaaaggagacgcggtcgcggtgggagtagaaacatgttttgtagaattgaaactctttggagaagaagcttgtgcaacagaagaagagatctgtgaaact

SEQ ID NO: 194477 - DNA, 222 bp, Arabidopsis thaliana landsberg
ctattctgctatttatcggacataccaatgctcaaaagtggaacgttagagagagagagagagaaataccaaatcaccatcgattcttcgctgccgaagaaaccaatagcggcgaatgtcgccgcccccacagattcgctacaaagagcctatagattctctctgcttaagaaacccttcttttacaatggatttagatggaaagataagataaaaatctaa

SEQ ID NO: 194478 - DNA, 2010 bp, Arabidopsis thaliana landsberg
atgcacggtgggtggaattggtccacatatgtcacaatgaattcaagacaagaattcaggtctttcattcccaattttagttggtgatggccttgttatgagttttccttgagaacatgcgttacatgaaaactcatcagatttgaatattttttggcttttcaatggatggttattagaactttgcaaaaacttttgcgtcatgactgaactaggatgtccaaatctttcatgtcatgtcttaaatgtactagtaaactcgagagtttactataacatttgttgtgattatatttatttttgtgcaatataatccgaaagataacattggcaattcttccaataggtattgcctcttagattttatgcaaagatattcaatgccatctgtaatactctcaaaccgttatagaactaagaacgaatccggaagcgttacgtgtgatgcccgtagacgatctgaccgagttcccagaacacatccggtaccaaggtcagttcatccgtgaacatcgttcctcacgaagaagacggcctaaggcttttcaacccgtaccatgtccgtaagttgtgttagtcgagacaagactaatatcaggagtacacaaggcttttaaagaaaatatttttttttcaataaacattgaaatacttacaatggattgggctctcgagcctaatacttaaatcgagtacaactacatatctaactttacaaagacaacaaactctacactggttccccaacgtccgtgctcttcgttaggtcttcctaactaaggttacctgtaagacaaaaagtagaatactgagtaatctaagattactcaataagtccgggatctctaaaaatgataataacccaacccaaccccaatcaacaagcagcaagcaaccaagcaatgcaacaaaaaaatgtatatactccattgagtatacataaacaatgcgcaatgaaattaaatatgcatgcaaccaactactctaccattaaacctagggccccgcgtattgataacacaacttttaacccgttttagctattggtttcttatgttcagagagcatttggtgccattctagagccaataagaggagaaacacgtattataggtgccaagaaggttttaagagttttgaagctaaaagtatcaaaagacgatcattccagtgcttcggaagtttagcatccggccaaggtctttccggactctgcatgaagatatttcagtatggatggaaagttagaagagtcaagattcacgtcgaagtcgaatcaaagcaatccatgaagccgtttggaagatatggcccgaagagtgaagacatgtcaagaaccggttgtttcgaactaaaaagtccaaaacacatccggccgatgagacttgaacccgggcagctccgagtagctcaccaccgaccattaggtcacgcccaagtctttccctttttgtgcagccgccattaggctcctgtcctgaagcccactactcggcccgatcacttacttatccggcggaatgacgttcttacccctaaacctaatttttgggcctcaagtataaatacttgtccttagccctaaccctaagtgtgccttcattaccagtgaaccctagctgtcgccaagagctgcccgcttgctgtcgcacctcttgaagcttgaagaacaccatctctctctctctttctcgttttcgtgtaagactctttaagatggatctttgcctcttgtattctccattcaaagaaataatctctaaaccctttttaagtgttattcatcttttagttatggtttactcaacccaacttttgattagctcctttgccatgagcgagtagatctctagttgggtttgagggggtttcaaaggggaattcatggggattaatagttcaaaagtctaggttggcggtttctatggttttgtttgatcgtttacactattctttctagttgagttgaatcttaatgcttgtatgtccggaacatcacctagtacatga

SEQ ID NO: 194479 - DNA, 144 bp, Arabidopsis thaliana landsberg
atggccttgaccgaagacaacctcgccggtgtaagcaaagcagttgtggaggtagttctcgtccatccaatggtggaggtcgccgagccaggcggtcctgatcacgtcggaggaggaaaaggcctgtttgtggtggtggtggtg

SEQ ID NO: 194480 - DNA, 220 bp, Arabidopsis thaliana landsberg
atgagcgtcaactacgagacatgggcatctacaataacttttcaagttggagactctttggtcttcaaatacaacaaagacttccacgacgtcaccgaagtcactcacaatgattacgagatgtgtgaaccgtccaaaccgctagcaagatacgagaccgggtctgatatcgtcattctaaccaaaccgggactccaacacttcatatgcggattttctg

SEQ ID NO: 194481 - DNA, 210 bp, Arabidopsis thaliana landsberg
atggcccacatatcagatattaaactgataagaacagatactacacttgatcttagccaaaaggccgagaaaggtatgaatttttcgatgggctcagcttcttacttatactactaaggttatgacaaactctctctagcttgtcgatgtgggactcttagaaaattagaatttttacgcatctatgagcaaacgcggacaaatcaataa

SEQ ID NO: 194482 - DNA, 127 bp, Arabidopsis thaliana landsberg
agactggccggtggcgccgcatctgaacctgaccgcttccggcgtctggacgcacgcgcggattatggacgcttatgacaatccgcaactgaacgggttgcaacccgccgaggcgccggattacacg

SEQ ID NO: 194483 - DNA, 1095 bp, Arabidopsis thaliana landsberg
atggaagaagacgaaagacgcgacattgttatgtcaagagcttcttcttgtatgcagtggagtcagtggcaattacttgattcaattttaccaacaggaggatttgctcattcgtttggtctcgaagcagctattcagactcggttagtttcgtctcctgaagatttagaaactcacatcattcatgtgttggataacacagctagcttattgcttccttttgtctactctgctctcaaatctcctgatatagagacatggcataaacttgatggaatacttaacgctactttaactaaccaagtttcttcaaaggcgtcaatgtcacaaggatcagctttgtttcgtatagctgcttcggtttttactgaggtaccaaatcttaagatgattcgtgatgcttctttggggtcaaaaaatgtatgtttccaccatgcaccgatattcgggcttgtatgtggtttactcggcatggattccgagacttctcagagagcgtatctgtttgtagcgctcagagatgttctttctgctgcaacgagattgaacatagttggaccgatgggtgcttcggtgatgcagcatcgcattgccattgttgctgaaaccgttttagagaagtggatgaatcgtgaagctggtgaagcatgtcagacttctcctttgctggatgttgtgcaaggttgtcacggttacttgttttctagactgttttgctcttgatgaaaacatatgatataacctcacttaggttacatcgattagtgcatattgttaattgtttgtagtttatgtgcttattgttaatttttcagttggatcatatatgtgtatttgtagacaaatctgtttttatttcgttattactaatcaacaatatatatgtgacctagaatccataaggaaatatgaaatgtgtttcagaaagtcattgcaatcgtctatcaaaacctctcacttccttcactcagaggaccgggtctcgtggtgtggtgccagtgccctgccgcagagaagagcgttcttcgggatcaagtactcatctctgagggaagtggagggtgtgtaaacacgcatgtaaaactgttgtcccag

SEQ ID NO: 194484 - DNA, 215 bp, Arabidopsis thaliana landsberg
gagtctttgcttgcactaaacaaggtaagggaagaagtggatacagaaaaaaaccgctcgaagcaagagaaagacatggaaatatgcattcgagcgaagaacaacacatgggtcatcgcgcgtctaaacagaggtaaagagctttacatggctttagagaaagcaagtgaaactcttcttgatgctacagactctgtccaaagattcagcaacag

SEQ ID NO: 194485 - DNA, 1083 bp, Arabidopsis thaliana landsberg
atggatctgtacgagcagactattcacaggctcaacgagagcgtgttgtgtcccaagaacgtttgctctaggtcagacgtgcaagcatggctcagcaccgcactcaccaacctagacacatgtcaggaagagatgtcagaactcggtgtctcgtctcattccttggagagcattaccattgatgtcattaacaccttggccatcaacaaggtagctctaacattattactaaccaatcaaaattctcaaaaccatcttaaatatcaagcatgttttgaataattcactcgttgttacttgatttttttttgtattttttagaggatggaacaaaacggtaaggagtttgggatatcgaaaataacaatgaaaacactatctataggtgaaaaagtggatgtagtggtggctcaagatggttccggggactacaaaactatccaagaggccgtgaatggtgctggagagaggcccaaaggaagcccaaggtatgtcatacatgtcaagcaaggcgtttacgaggaatatgtcaatgtaggaatcaagtctaataacatcatgatcactggcgatggtatcggcaaaaccataatcaccggtgacaaaagcaagggccgaggattttccacttacaaatctgccacttttggttagacatttctccttaacaacttacactatatatattcgttttattgccacgtaacatattgcatgacagtggctgagggggacggtttcgtgggacgagacataacaatcaggaacacggcaggaccggaaaaccatcaggcggtggctctcagatcgaattcagacatgtcagtgttttacagatgtagcattgaaggctatcaagacacactctacgtgcactctggtcgtcagtttttcagggagtgcgacatagacggaaccgtcgccttcattttcggaaacgccacaactgttttacccaacggttggatatttgcatgtcaaaaaacgaaaggagtcaacaccatacgggcacagagccggttcaacccgaatcagacaacaggaatcgtaatccataactccgtggtgaaaggagctccgggg

SEQ ID NO: 194486 - DNA, 646 bp, Arabidopsis thaliana landsberg
ctatcagtgctgaatggtcactgtccgggtatccttagaggggaccttcgcctgggtttgactacactctccacccattttgccttctcttccttggaaaaacgacgagacatgatgcactttgacagattcagaaaccagagcagatctgagactcagaaaaaccaaggacaaactcgcagacctcaacctgaggtaaataagtaccacttgttaacaaaaaccactcatagtaactcctcaagagaaaaaagctaccaacgggagagaaattctacactaaggtagtaagcagggcaaaaacaacctccagccccaaacaggaccaaaactacaacctctggtctctttatccccaggaacaaagattccaaaccaaatcgccaacaggggagctaagaagagtcatcttacttgaaagttccgtctggtctcctctataactccttgcgtgcaaacagagagggtagaactcgggaaagggctagaaagaacggtggaaaggacccgaaaactggtcggaaacaggggaacagcgggagaaattaccgaaaataatatgcaaaagtagctaagatctactttttcaaaataacgtaacttcttttagcgcctcgaaaccagtgcccgagagagaactctataa

SEQ ID NO: 194487 - DNA, 299 bp, Arabidopsis thaliana landsberg
caaggagcaataaaatcttcaaagataaggtagtgctccctccagaagtagctcttcaatcaatcctgcgagctaaagaatggcaatcggcgcagcaaaatcttgtaaaacgctcctattcccgagtgtcccttccccgggctgttttctcgccagatctgatcttctgcaacactgatgcggcttggattgattcataccgtggcgggactaagatggattttcagcatccagacgaaacagttgggatttcaggcttctcgatatgtatcgtgtgtagcctcaccgttgatggctga

SEQ ID NO: 194488 - DNA, 277 bp, Arabidopsis thaliana landsberg
atggcggtttcagagcagagtcaagatgtgtttccatggcttaaatcgttaccggttgctccagagttcagacctactctagcagagtttcaagatccgatcgcttacattttgaagattgaagaagaagcttctagatatggaatctgtaaaattctgcctccactgcctcctccttccaaaaaaacctcgatttctaatctcaaccgttctctggcggcaagagcggcggcgagggttcgtgacggcggctttggcgcgtgtgattatgacggtg

SEQ ID NO: 194489 - DNA, 226 bp, Arabidopsis thaliana landsberg
gttctaacagtttctgctgataaatctgcgaaagtatgggatatctttgaagatgcaagtgggaaattgaatcgaactttggtttgccctggtataggaggtgtggatgatatgcttgttggttgtctctggcagaatgatcatctcgtgacagtctctcttggtgggacatttaatgtgttctctgcaagcaacccagaccaagaaccagttacatttgaagacg

SEQ ID NO: 194490 - DNA, 116 bp, Arabidopsis thaliana landsberg
gattcgttctctatatatatttagactttgatgtttctcgttattggagagagcatgaaagcgagagaaaagtacgtaagacttatgatgggaagtggacatcattttcgcgttga

SEQ ID NO: 194491 - DNA, 100 bp, Arabidopsis thaliana landsberg
atgcctccgttccaagtgaagatgctgcatgttcatggttatggaggaaatgcggaagaggtggaacgcttacataaatttattggggagtcggaatgcg

SEQ ID NO: 194492 - DNA, 193 bp, Arabidopsis thaliana landsberg
aggttgagtttatggaacagtaccttcacgcctgtttcctgtgctaatgacaacggcgatggcaatagtgtggccattgagaaatttgacttgaaaatagggcaatactactacgtatcggttcggtcgaaaattaattcaactggttcgttcaccctctgtttggcgaatcagctgcctgagttaaaaggtg

SEQ ID NO: 194493 - DNA, 521 bp, Arabidopsis thaliana landsberg
  unsure (1)..(521): unsure at all n locations
atggccgaggctcgggctacgctcccgaggtaccctaggacatttctgagaccagcgggaacgattttgtaacggaatcccaccggagtgaggcatcgtgccctcggaccctatcaaatgggtccgggtccggcaaatcnnnnnnnnnnnnnnnnnnnnncgcctccgggcctctagccgacccctaacaaatgtggcacgggcgtccactcggattacccacttgcagctcaccggagacgccatgttcggcgcccatcgagggtaacatggcgctttcccccctcctccttgcggaaaggcgacgcaggggcgtatgtaaaaaagccgagtctgtccctgatcgccctctcgccctgtgcggaggctcaggggctgctctcgcaaacccggctccggccgaaccgttgacagcgtcaacataccagcccgagaacttgggccccgaccgtacacccgggctacggccagttcgcatgagggaacaaccagaccagccgaagcattacgcaaggcattaa

SEQ ID NO: 194494 - DNA, 60 bp, Arabidopsis thaliana landsberg
atggatgggaagagtaataatcatcatgatctttttgcgaatgagaacgaagagaaagag

SEQ ID NO: 194495 - DNA, 425 bp, Arabidopsis thaliana landsberg
atgacacattcgatcaagaagaagaagttaactatgttggagcccaaggatgcttcaagaatcgcggctacaacaacaacttcaacaacaactttagaggtagtcctagtctttcttaaagaaacccgaatgttgagaatcctcaggatcaaaactatccgtgttggtgtcggatccaaaaccgatcgtccggttccaaccaaagattgccacgtcaacaaaagggggttcgccaaggattcaacctagaggataccccaaatcgaacaaggagtttgactttgtgcaaggtgaagaaccttgtcgagataggaggcagttcagatagttgctatgggcctaatgtcgaagcccaagaagaagtcaaaggaattcaaattcgaacgttaaggcatttaaccaaagaatctaaacggatgcattga

SEQ ID NO: 194496 - DNA, 293 bp, Arabidopsis thaliana landsberg
attgctattccaggtatcatcagattagtttggcaaaagaagacgaggaaaaaacggcattcatcactccgtttggtgctttctgttatacctccatgtcgttcggcctcaaaaacgctggagcgacttatcagagagctattcaaacatgcttggccgatcactggggcaagcgtgtggaagcttatgtggatgatgtggtaatcaaaacagaaaattcagaaaatttcattgaagatcttcaggtggttttcaacagtctacgacgatatcgatggaagctcaatccataa

SEQ ID NO: 194497 - DNA, 482 bp, Arabidopsis thaliana landsberg
atgaagaagcgaatggttcttctatctggggaatcgattcttctcaagctttcgtacgtgtattattcggatcgagtataaaagaaaatcatgataacaaattgtgggggggacaagaaatatatgccacataatattaccctgaagtgtagttgtattttgaccgctaagtctagagacatgaacatctacttgccccatttgttaattcctttcacagagtaatatattttatttccaactagcaaataaggacaagatcagtaatcaacacggtatacggattcattgaacatatacatgagttattcgaaactattttttattttgtttctggtttaatcatttcgtcagtgaccacttacacccatttgcttggtagatttgaaaaagttgatataaagtacttgttttgctgcctgctgacgatcattgagggtgatttgtttgtcaaattagctcgtcgaatgtcatcattgtaa

SEQ ID NO: 194498 - DNA, 89 bp, Arabidopsis thaliana landsberg
atgatccgccattcgcgacataagttccccactgtttcgcagattgacagctcagtcaggcattcccagcccaacaaccgaacaggcag

SEQ ID NO: 194499 - DNA, 613 bp, Arabidopsis thaliana landsberg
atgaagggaacaaattcatattcagattcagaggatataaagtctgtcattattgattatagttcagacaataacacaagtttgcaagaatatcttggtgggatgacaaactcggctgtcactgtagcatacatgtaagacataccctaaacacatgagtcatcgtgtaagatatatttctcaaatcgacatatggttagtcggttgcatttttgctcagttgttgaacaatggagttaggattttgcatgcatggttctcgagtctgatcagttaaaaaagacatgtgagcctcataactaaatagcaaattagttgatgcaactcaccctttttttgtagtgttggttccacagaataagctctagaagttgacaaatgatcggctggttgcgttttcgctcaacatttgaacggttgatcacaaatcttgcatcaataatccaaaatgttctatgacttttgaaccttatttttcacaagattacatgaagcaatttctcattggactcgaatactatcatgcagatcaagttcttcaccgcgttgttatatggatatcgacttcactgaccttgctgaacaagggactcttattgcttctcatattaag

SEQ ID NO: 194500 - DNA, 66 bp, Arabidopsis thaliana landsberg
ggtttatcacccgtcatcttcgtcgacgaaatcaattttcggactccgtcgaattcgaattttcag

SEQ ID NO: 194501 - DNA, 607 bp, Arabidopsis thaliana landsberg
atgaagaacaacaacaattcatcagtttcaatcgagaatcatccatggaagaaaaaaccaaccactcttttacttttcctttctcttctctccatctctctgcttctccttcgtctctcccaagacaaaatcatactcatcaccaccaccaaaaccacagccaccactggaaccgatcatcaacgcagtcacaaatcttctgaggacgatacgtgtctcggacgctacatatatatccacaatctaccttctcgattcaatcttgaaatcatcaaagattgtaagtctattacaagaccaaaggacaaaatcagtatgtgtaagtatctcgacaactccggattcggacctttgatcggcggtaaaagttctgactactctccgagctggtacgctactaatcagttcatgctcgaagtgatttttcacgagaaaatgaagagttacgagtgcttgacgagaaattcttcactggcttcagctatttacgtaccttattatgctggcctcgatttccggcgacatttacggcggcgtaacgttgctgcgagagacgccgccgggaaggaacttgttaaatggctcaagaagcaacctcagtggaaag

SEQ ID NO: 194502 - DNA, 162 bp, Arabidopsis thaliana landsberg
atgaatgtgcaggtcgtagaggaagaaccggctaatttaagtgctcaggggactgctcagaggagaatccgcctgcagacgagattgaggaagcctctcataaccctaaacaatacaaaaagaaactcaaatggcagagaaggagaagcaagccataggaag

SEQ ID NO: 194503 - DNA, 127 bp, Arabidopsis thaliana landsberg
cttcacaggacagccctcggtcaagtatcgtctccgagagggacgcgagagatatgcagatcggggcacacgctaaatactcgagacgcactgagaatagctggcggcaaggtctggcactgagacg

SEQ ID NO: 194504 - DNA, 389 bp, Arabidopsis thaliana landsberg
atgatccggagcaaaggctcatcacatctagtacactaccacgaagatatcgtaaggtttgaaagagagaacaagaaaaagaagcagttagcggttaagagagaagctgagatggctgcccgtgacgctgctggaaattttgtgaatgatgatggacacccatttgaagaagaacatcatggagtgtttcaggatccaccacctcctgaagcaaatcttcctgctgatggtggaaacgctgcccatgcacatgctgccaacgctgcctgtttagctactgctaatgctactcgtttaaccgcgttgaatgctaggcctgcgcatgctcgacaaactctgagagatcatgatgctcccaatattgaatttttagagacaggaaccaacag

SEQ ID NO: 194505 - DNA, 1518 bp, Arabidopsis thaliana landsberg
gtcacagatgcatgcaatacctgttttgcgcagaggcagacattcactcaacaggttttagccggtgttctgaatcaactggtatataacaatctccatcgtactgagtatttcttctattcatgttttgatttcttttcttcttctggacattttttctcattggcgagtttttggctgcaggtccagcaaattccactgccaatgttattcatgcgtacagttttacaagctattggtgcttttccagctctggtaacaaacttatcacatctcttttttcaatcccaatttaatattctctgaataatctctttaacttgatattctaatagtcggacttcatcctgtagattctttctcgtctcgttagcaaacaggtcagtattggtcttgaaacgttatattctctctattgtccattcttataattgactgtgtgttggaaataaaacggtggctctctctatgtgtatgcctcagatatggaaatatccgaaactgtgggttgggtttttgaaatgcacacagacaacacagcctcaatcatataaggtcttactacaggtgcgattatttaatctcttccacaattgttaaattacctgttctcatctatcggaaagcggttttatcactgacattcctttcatttagcttcctccacttcaactgggaaacgcattgactaaaatcccggccttaagagctccgctaaccgcacatgccagccagccagagattcaatcttcacttccaaggtaacctttcctctttcaaatttccatgaattccagttctaaacaaacaacttcagctatttgaaatccatttgctgatcacggagatatgaaacatgtttgttggtaggtctacattggctgttcttggacttgtccctgattctcaaggaacacaaacaagccaagtgcaagcgaatgagacacaaacgagtcaggaacagcagcaacaacaagcaagcgagccacagcaaacgagccagtctcagcaagtttctgtaccattgagccactcccaagtagatcaccaggaacccagtcaggtagttgccagtcagtctcaaagcagtcccatagggaccgtccagtcagcaatgagtcagtctcagaacagtcccatagatacgggccggtctgaaatgagtcagtctcagaacagtcccatagatacgggccggtctgaaatgagtcaacctcagaacagtcccatagatacgggaagatctgaaatgagtgaatctcagagcagtcctattggtcagtcacaaagcagtcctattggtactggccagtctgaaatgagtcaaacccctcaagtgtcggactcgagtgctccagaaccaacaagccatactcggacatcagatcctcaagcgtcaagccagacactacgagatgatgatgagaagatagacgacacagcaacctcccaaaacgccgtgacagaaatcgagaaatcaaaagaatcaaaagaagaagaagaagaagaagaagcaga

SEQ ID NO: 194506 - DNA, 57 bp, Arabidopsis thaliana landsberg
atgctcgatgcctttgctgacggaagcagttttatctgtctgcaatgcggtggtctg

SEQ ID NO: 194507 - DNA, 561 bp, Arabidopsis thaliana landsberg
atgccggatatattgatgcaggtatgtattcttgtgaggagaaacgtttagatggagaattagtacctaacaataatctagatgtctcacctctgaacttcctacatcttgtccatagacttttatgataacttgcttcatgtggtcttgcaggagaagcttcggctttcagggaagtcaaacacatgtatagtacttacaaccgaagaaacttcaagctcagaggtattttggatcaatatatatgatatcaagtacactcgcagatagaatcagatgcagcattgcagtatgattgtattaaaccttcaaaactcatccgatctgtctcttgaaatgtttcagggtttaaaagaaagcgataagatacagctactagatgactgctaattcaaatggtgccaatatatcatcaaggtttgaggtcatattacttctttctttcatgaacagggacaaagccaaatctgtctaaaacgtttgttgtttactcttttgaagcaagaagccacgagtctgatagcattgacgagaatgaccctggatttggatagaaagaag

SEQ ID NO: 194508 - DNA, 278 bp, Arabidopsis thaliana landsberg
atgcaggggggtgtgaaggagaagttgttgatcaaagagaaaaaaacatcagaacatgaagaagaggaattatcattggtgaagagggtgtggaatgagagcaaggtgatgtgggtagtggcagcaccaggcatttttacaaggttctccacctttggtatcaatgttataagccaagcatttattggtcatattggttcaagggaacttgctgcttatgctcttgcgtccactgttctcatacactttgccaatggaattctgttatggaatggcta

SEQ ID NO: 194509 - DNA, 459 bp, Arabidopsis thaliana landsberg
atgcaagctaagctgtttaatgatcaagaaaacgagtatgatgttttggttgcaagtgatgccgttggaatgggattgaatcttaacataagacgggttgtgttttacagtttgaacaagtacaacggcgataagatcgttccagttgcagcgtcacaggtaaaacagattgccgggagagctggaaggagaggaagccgttacccagatggacttacaacgacattgcacttagaagatctaaactatctaatcgagtgtttgcaacaaccgtttgatgaagtaacaaaagtagggcttttccctttcttcgaacagattgagcttttcgctgcacaagttcccgacatggccttttcaaatctcttagagcattttggaaaacactgcagactcgacggttcttacttcttgtgccgtcatgatcatgtgaagaaagtagcaaacatgttggagaaa

SEQ ID NO: 194510 - DNA, 84 bp, Arabidopsis thaliana landsberg
atggaatgtatcatggaaaaggctttgttgaatctgttattcgcaactagatgtaaccaaggctttgaccttgaagaagaataa

SEQ ID NO: 194511 - DNA, 69 bp, Arabidopsis thaliana landsberg
atgggggctcttgctcaagttgttccgtggatacccgaagacgacctgctgctaaagaatgctgtcgag

SEQ ID NO: 194512 - DNA, 317 bp, Arabidopsis thaliana landsberg
ttgaattggttgattcgattcctcttgtgaaaagagctgatcctcataaccttccgtttttcgacggtgtctttgattttgccttcactgcacatctagctgaagctctgtttccgtggcagttcgtggaggagatggagaggacggtgagacgtggcggattttgtgtggttgcggttgatgaatgtggtggagatgatgtaagagacattgctaggctttttcataactccaaggtcgttgatgttgctaatgtaaccttagaaggatccaaaaagactagtatactattcaaagttcaagactctcctacatga

SEQ ID NO: 194513 - DNA, 1380 bp, Arabidopsis thaliana landsberg
atgtacttggatgaatcggcaatgaacgtaaaagggtttgagagtttagatattctctattattggaaagataacggtccactgtttggaaaattggcttccatggcttgtgatattctaagcattcctattacaactgttgcgtctgaatcatcgtttagcatcggaactcgagttctaagcaagtatagaagtcgtctttcaccgagaaatgttcaagcattaatatgcagtcgcaattggttaaaaggttttgaatcttatgaaaatggtaagtaagttgttttcataagttttatagtcacacaatcttagtctatgaattaacattgttagtttgtgtgatatttgtagaggagtatgaaaaatttgatgttgaagatgagactctacctttcttccagtcgcttgtggatgatgtagatggatgttgagttgcagattttattttaagtttgatattcatgtttggatttgagttttagttcatgtttcagttatcatgtttgcgtttaagaagttgcaggtctttctcttgacttaagttcattttctgtttcacatttgagtttaacttgttacaattatgtttcagtcctgacttttgttttagtttggttctgtttttatgatccttttgttttagagctatctcagattatcttgcttcagccaagtaggctgcagttcttcaagttcttttacctgcaaatgtacaaactgaaatcgatcagatcggagcgaaactggattcttctgtagctactatcactgagaaatcgactagtaactccaatcacataagacatttccttgattctgtgtaacaaactcctcctaacagtctatctgttacagaatctttggattttgaaaaacaaatgtataatagtcatttctgtactcgcaggagagtggcgcttatcgtagtttcaatcgtcatgcttgtggtgacttttcttggtctcggtaatgttttcatctttgactacatgtttctcaactatcaactaatgtattgaccttagtgatcttgttatcatttcttctcctgcagtttcttcgatttgtactacagacacatgtgtggcaatgagcgaatgggttgagagaccatcaagcaatacggctctggacgagatattgccttgtacagacaatgtcacagctcaagaatccttgatgcgtagcagagaaatgcccgcgggccgacccgtatatccgctgggctttgcgggccgggcttggacactgataattttgtccgcggtcctaaacaggctaacccgccgcggcccgaaaaaagaaagcccactgcggggcgggctagatgggcgcgggccggcccgtctgacacctctaaacgtgactgaaaaataa

SEQ ID NO: 194514 - DNA, 397 bp, Arabidopsis thaliana landsberg
tgaagaggcaaaccatgttgagtggatgatcaccgaggatggtgagttatacgcggtgccaactgagaatgccaccgaagaacaagcatgtgacagtctgaacaatatactgtcacgtttctatgtgccatcgacggatgaggagggaagtttcagtgttccaaatatgggaaccattggcgagcatgggctagaactggaagaagtgaatggagacatgttcgatgtaccattgatccaggcgaatggtgcgtttggagcgatgaataagtatggagacgatgatgagtatgacatgctaatgcttatgggaaatgacgaggaagatgagagtggagtcatagagaatgagatagagaacgagttagagcaggcgatcgataagttaatagcctag

SEQ ID NO: 194515 - DNA, 305 bp, Arabidopsis thaliana landsberg
atgggtgcatcaacatccagaatagatgaagataaagccttacagttatgtcgagaaagaaaaaaattcgtccaacaagcactcgatggaagatgtttgttagctgctgctcacgtttcatacgttcagtctcttaagagtaccggaactgccctcaggaaattttctgagactgaagttccagttgaatcttccttgtacacgtccactagtgcaacaccagaacaacctcttgctttaatcgagaaatctgtttctcatatgtcatactctcctccacctgcttcacattcccaccatgacac

SEQ ID NO: 194516 - DNA, 325 bp, Arabidopsis thaliana landsberg
atgcctccgacaccaacttatagtccccctataaaaccaccaccagtacataagcctccgacaccaacttacagcccccctataaaaccaccagtgcataagcctccgacaccaatttacagtcctccaatcaagccaccaccagtgcacaagcctccgacaccaatttatagtcctccaatcaaaccaccaccagtgcacaagcctccaacaccaacttatagtcccccgctcaagccaccgccagtgcataaacctccaacaccaatatatagtcctccaatcaagccaccaccagtgcacaagcctccaacaccaatttaca

SEQ ID NO: 194517 - DNA, 233 bp, Arabidopsis thaliana landsberg
atgatggaccagaccgcaggtaatgtatacccataccttatctcaactctagaaccttatccaaatgcttttattcttatgatatatgatctgatcattgatccataattatttgttgatgatgcagtttactcttcatagaatcagcggatagacctggactattagttgagctggtgaagatcatttcagatatcagcgtcgctgttgaatctggagaattcgacaccgag

SEQ ID NO: 194518 - DNA, 354 bp, Arabidopsis thaliana landsberg
atgggggaagagagtgaccatattcacatatctgctttgtcggacgcacttggtgttgcaatccgtgttgtgtatcttgaccgtagctcatgtgatagtgggggcgtcactgtgaatcatcatgactttgttcctgtgggcattaccaatgagaaagatgaagaagcttctgctccatttataaccttgctgtatcgtccaggccattacgatatcctctaccccaagccatcttgtaaggtatataaacacgaaatcgccatatgacctctcttccttttagattcgacgtggattaaagttaatgattgtgttgttacaggtatcagacaatgtggggaaatgatcatttga

SEQ ID NO: 194519 - DNA, 145 bp, Arabidopsis thaliana landsberg
aaacggtggagccgagaagcggaaacagctcaaacatgaacttgtcgaagccattgagccttttgaacgtggtgccactgcctcgcctgatgatcagcttcggattgatcaggttcttgatttctcttcctgtgggaaccattga

SEQ ID NO: 194520 - DNA, 75 bp, Arabidopsis thaliana landsberg
aaagatgatatcaaatatcatgtgggaagacatttcaaggatatatctaattcaaggtttatcggaagtgtacag

SEQ ID NO: 194521 - DNA, 136 bp, Arabidopsis thaliana landsberg
atgttaaagcatttcatcgtacttcctgaatgtggcaagcgtttgtcgcttacatcgcgcttgcttcgattcgtccattgcaacaagattgccagccgtgtacagcagtacgtcagcgactgctctctccatacac

SEQ ID NO: 194522 - DNA, 2234 bp, Arabidopsis thaliana landsberg
attttgcagctgcgataaagatctaaacgagcacaagggctgtaagttacacaaccacatagtgctttcctttagttatactatttcccttgaggtatcttttcagtaacttagatagcattgtgttcatacttgtaggtgagaagaagatcagttttcttcaaggtaagatcacattgatgaaactctgttttgtcaatatatcttatgaaactctgttttcctgcttcttctattagcaaccttggatcttcattactttcttgatctcacgtttagatcagcagttttaaggtttatgattcctgcgtaatttattgcatagcttaaaacgatgatttttactgctaattcctttaacataattctgcgtaaattgggattttgtattctctgtttctgtaccaagcttagcttaatcgttatgcatttcctctaatatctattttcatattttggtttagacaaagtggtcattgatacattgtcttcctcacttgtgaattttgatggaacttagtaatcttttgattgctgcaagtgccaagtctcaggattcgttttttttttaatcattcaagattttttctcgtgaagcatacttatgttgcttatgtgactactatatcctttgaagttttgatatacaatatgtctaggttaaggctctttgaatacatattttgcgacgttatgtttggtcacaacacggagcgactactttgtcattcatttacgactagttcgctactagacgaaatacaaaagcaattacgtcaccattttaggacgcaaacaatatgtcacaatatagtctctatttcatgactacattccgactaatttctgcctataaacaaaaggtcgcgatttgtactttcggacgtatttgatactcgcgatttttggaattcgaaagatcacataagaaaactgttatatatatatatatatacgttgattgagtaaactataatcactataagtttctaaaagctttaaatcacattatttgaacacaataatttcattaattctaaatcattcttaagtttaacatgtttgtttagaagaaggatttgatttttttgtaaatatcaaaataaagttatcaaatcaatgttttaaactcttatactaatagggatactctagattacagttatgtttgtttttagtgattggtatcaatagttttgatctgtaatgccttgaatctaaaaaatcaatttgtgacttaaaccaaggagtcacaaaagagtaacaatatgcgactgtattcggactcttttgatactcgcaatttttgaagatgaattttgggcttttattttaatggaattgggctttggtttgggagatgaattttgcctccaatttcgtttctgttgtgactcgtttgcgacagattaaggactcctcttcgttatttactatgtaaacacttagtcgatttttcattatgcggcttctctttctccatttagggtttcactctcaaaacttctcaactctcttctcttctcaaatcgatttctctcctcaatctctctcagtctcttctcaatctttcctcgatctcttctcaatctcccctcaatctaatgtcgccgaagggaggaaagtctacaaggggtcgcggtggcaaatctcaatcacgtctgagggtcttcactgggtcaaatccggcgaagccatgtggtagtaggacattaccggtgaatcctccgtatccaaccactggtaagcgtaaaagggcagatcctccgaaaccaagcagaggcttgagtccaaatccaacggatccaagcggtgttttgattcaacctccatcgaatccaagtgtgagtcggactatgaataatagtggcggaggtgggaggagaggaggaaggagtggtgtcggagtgtcttctcactcctctaatccatcagagacaatctcatagaactcttccatcccagtacccgccgaggacacaacctcttcctgctcgtcaaccacggtctcctgttattcaataaccgcctcttgctcctcaaaatgacgaagaggaagatgacgaagaaacagatgacgacgacaacaacataccaatcgaagaagatgatgatgaagaagaaaatccagacctagactacgaagagctgttagatggtttgcttaatcttgcaggccgacaacatttacctgttttgtccaaggttcctatcccatgcattgaaactctctg

SEQ ID NO: 194523 - DNA, 207 bp, Arabidopsis thaliana landsberg
gcgctgatgatgccgggcgagcttggaatggatgggatcaagcgaatcactgtctccggccagcgtgtcggcagcgtcgtgagtattatcgtcgacgataccggtcccggcatgccgctgaaggcgcgtcagaacctttttacggccttccgcggctctgcccgctccggcggcacaggtctcggcctgacgatcgcccccgagctg

SEQ ID NO: 194524 - DNA, 92 bp, Arabidopsis thaliana landsberg
atggcgctggcttggctcgggcgcggcgctgggcatgcgggggcgcgcgcgagcgtgctctggcgcgggcaggaagcgtcgaacacgtggag

SEQ ID NO: 194525 - DNA, 372 bp, Arabidopsis thaliana landsberg
gactgtctgtgcgtgtaccaccgatctatgcggtgcccacacgtcgtactgtccggtgcaccagggaaccgcagcccatcgtctagttccaggtggcacccggaaagaagaccatcgtactatccggtgtgaggatcggactgtccggtgtggaaagcatgcgacgccaacgatcacctgctctgacagggcaacggctaggcgctccggacaggctacagtgcgctgtccggtgcaccaccggactgtccggtgtgccgcagaaagcagcagcttttctccaatggctatatttgtgttgggggctataaatacacctccaaccagccatttccaagtgtgggagcccaagagacataccaaggcatatag

SEQ ID NO: 194526 - DNA, 464 bp, Arabidopsis thaliana landsberg
atgacgaaaatttcggctcaaatttctttccagccggagttgtccccgtacagcctgcagaaagatttttacaatgtttatgtggccaccggttttctcgattacacggtggccaaccaattccttgatcaggtgctgttgttctaccgaggcggcgattatttgtactcatcggagagcacttatacactatcgcgctttctggatatccgcaattaccgagagtggtcgtccgagcaattccgcgtggcgctgaatacgttgaacaaagcggctttccactatgaatcgcccagccaaggcgctccgaccggaggaaacttgatcacttacatggttcccattcccgtcaacagtcctcatccgaacggcgctgtactgtttctgttcaaggatacgggcgatcatccaatcgctcaaaaatattatggacgcccagggagggaacacgattattctcgacc

SEQ ID NO: 194527 - DNA, 548 bp, Arabidopsis thaliana landsberg
cgcaggaaggtgtaatgaagggctcaatatggtacatttttgtaaatcctgtagtccttaagcttatcgagaatttgatttacaaggctgatcttgttcataccatccaatttcagcttaagaagatatgtagagttgcaaataaacctctcgtggtgacttacactggcctgatccaagcatgcgtcgactcgggaaacatcaagaatgcagcttacatcttcgatcagatgaagaaggtctgcagcccgaacctagtcacttgcaacgtaatgctaaaagcttatctacaaggcggattgtttgaagaagcaagggaacttttccagaagatgtcagaagacggaaatcatataaaaaacagctcggatttcgaatcaagagtattgccagacacgtacacgttcaacacgatgctagacacgtgtgctgaacaagaaaagtgggatgattttggttatgcgtatcgggagatgttgcgtcatggataccatttcaatgcgaaacgccatctcagaatggtacttgaagctagcagagcaggaaag

SEQ ID NO: 194528 - DNA, 130 bp, Arabidopsis thaliana landsberg
atgaaatcgttgagaatatttttgaaagaagaaaaaaaaataccgaaccgggtagttcgctactactacacaacaacaacaagagcaacatacgtttcgttcgatgaacagaaacactttgggagtatcg

SEQ ID NO: 194529 - DNA, 396 bp, Arabidopsis thaliana landsberg
  unsure (1)..(396): unsure at all n locations
atggcatcattagttgaagggcactgtgatgctaaagatctcgaagagtcttcagagtgtttcaacaagatcattgggaaagagggagtctctcatgcaggtgatgcatttgaggagttggtacgtgctgattgcgtcagttttcaggcaatagatgtatacaagcttttcagtgagctagtcaaacaaaatcagttggagcctgggcacagtccatacaaaattnnnnnnnnnnnnnnnnnnnnnnnnnnnnnnnnnnnnnnnnnngggtttacagaacctttgagtcttctaccgatgatgagaaatcacgggttccttcggatacagaacccgcacatcaagtacttcttgacatgtggaactagctcagaggcattccatttgttacatttg

SEQ ID NO: 194530 - DNA, 127 bp, Arabidopsis thaliana landsberg
atggaggaggatacggtgggcaaaaagggaagtgaggcactgtacaaatcgggcatatgtttggctgtgttggtgctggacgccattgttgttgatgattatgattatgatgatgatgatagttctg

SEQ ID NO: 194531 - DNA, 138 bp, Arabidopsis thaliana landsberg
atgtatggagcaaaggctgcaatgagcgtgtggaacccaaccattgaaacagaagaggagttcagcttgtcacaaatttggattacctctggaagctacagaaaaaacaatcttaacagcatcgaagttggttggcat

SEQ ID NO: 194532 - DNA, 1325 bp, Arabidopsis thaliana landsberg
ggaatggaacacgacaaacagtgagttctgtaacagctaaactaaaggcatcaggaatggtccggtttcagttagagatcgagagaagtattgggaagaatgagagtgtgataagtaaaaaagtagcatggagaacaaaaccgaagatcgaacgggtttggtttgaagtaacggcgaaaatcgaaggagataagttgaaagcagtgaggctgagaaaagtagtgcctttcattgaagtggatacagaagcatggagcagtttgatgtctaacatgtcattcacaaagtttccatcattacttgttcctcaagaagctttaacactcgatgtcaaatggtaggcgcaacacttttatacgtttgataatcttccataaggcagaaaccacagtgtaacgatggattgtatttactcgtccttgtatgtatgtatatacttctggttctgtaaaggattatttatcacgaaaatggtgaaaggagttgttacgaatcattgcatatttgcatgaacaagttttggattttgagcatgtgttaattttacatatattttcttcacccctattttcatttcaaagtcataatggaaaattgatccgaaaaactaaactgaactagcttgatataattaactagatactgaaccaaatatgtaactataaaggtttactctccttattggtccacttgacaaattcattatcttaagatatatgaaccgaatatgtaaacactaggtcttgacccgcatgtacgtgacatgtttcatattttaagaattatgaagtaataaaattttattaaatatagatttattttgttgttttggtgctatacattgtacaattgtagtgtataatataaatgataatgtacatcgaaaagtgtagaatgttatttataatttttatgacacaatagctaatgttgtgtataagtcaaattttgaaatttgaaaatgaggagtaaatttaaaaaaatcttagattgaaatataatataggctaatgtaaacaaatgtattttatttagtatttataacccaaactcatatcaatgtatttttcagtttggttttaatctagtatattaatgttagaatatttgagctaatatattaaaactaaagacaaccgttcctggatattccttgagacaacaagtagatctagggttttctactttctttcttcttcgctgctgcttttcattgacaggttttgagacttcttcttgtctatgattcaggagttggtggagagcacttctccgtctacggcggtgtaatttttgtcatcgatgtggtcgttgctcatgattaa

SEQ ID NO: 194533 - DNA, 543 bp, Arabidopsis thaliana landsberg
atggttcttggccttggcttttttatcaccatcacgctcacgaacggcacggtgcagcgattcacaaccgcgcaagaagatatcaccatcggcgatctgcaatggaaagccgacccgggcgttcaaatcagcaagatcgaatttcccagcgacggctctgttgccaacgctgaaatcaatatcgcctgccgctctggtgggctgatctctgcgctcgacgtgaagcgcggaaaatacaacggcgcgtccgttctgattcatctcgcgtccacactctaaccttcctcacatcatcggagaataccatggcagtccagtggtcaaccactgttcgtaacgctttgcttgaccaatgggaaaccaccattggaacgtctgcggtattgcggatgtataccggctcggcgccatcgaactgtgctgcggcggcaaccggcagcaagatcgctgaattctcgctcgcgtcggattgggcgtctgcggcgtcgtccggctccaaggccctgagcagcacgccgctcaccacgacgggcatcacgccgg

SEQ ID NO: 194534 - DNA, 1128 bp, Arabidopsis thaliana landsberg
aggaaagtttagaggagctcccgatgaatcaccattagatcatttggaaatcttcgaagacatcgtttcctctattaaagcagaaggtgtacaagctgattactttctttgcaaactcttcccccactctctcgcgagcagaggaacatcatggctgcgtcaactggaaccaggttcattaaccaattggactgatacaaagaatgcattcatgaatcacttcgtcgataaatccgtgacagaggcaattcatttgcaaatctcttcgttcactcaggctccagccgagtcccttatagcatcttggctccgtttcaggtcttatcagcgtgaatgtccccaacatggcttccaagagaggccaactcatcaatatcttctacaaaggaatagacaagccataccggaatcaacttgatgcagcgagctactgtaacttcatgacaagaactactagtgaagcattactcctcattaccaatgctttaactagtctttcgacacatgaatttgacaaagaacgaagaatttcagctaagatagccaccgcgagcaaagagactcctgtttcaacaattttcgctcctatccaagcccccccccctctaccctcttcagagaccagaatggagtctatgtttgcgcagatatgaatctctctctacaaagctaacaaagcttgatagcaaatatgaatctctctccacaaagcttgatagcaaatatgaatctctctccacaaagcttgatagcaattatgattctctctccacatatatcaataacaagattgacaatctacgctctcagttctccaatctctcacctacatcagcttttatcaatgcagtcacactacgcagcggaaagcagctcaacccaatacttcagcgcgaacgatcagctcagccttcatcttttccaattgcagaaaacgaaccagtgtcgttcgatacaccagggtgtcgatcgacaccaataactcttgactactttgtcttccctttgtcgagtggaatcgacaatttcgcggaggagcactacaaaaaaaaactgaatattcttacggaaaaattgcgaccattattttcgtcagaaaattatgaccattttcatacaaaattgtga

SEQ ID NO: 194535 - DNA, 718 bp, Arabidopsis thaliana landsberg
atgagccaggccggtgccgaagctgggccttcagagcccaccaaggagaaaaccttggaaattggagagaaggcagcggagggagaagctatagaacagattttgcctgaaaaagctgccgctccttctcccaaagctttgaaagaaaatattgaatatattatccgtcatgcttcggggaaaaagctctctaaagaagaagaacgagaagctcaacactatgcccagaagctgaaatatccaaagggggcactagtattcaacggcagcggagaagaagatttcttgtattgtctctcagacagcaaggtgatttctgtctgccgggagatgagcagaagcttcggattcccgacactataagacgggctttcggtgctatcgaaagatgaattggccgacaatttagcatataatagtttaaaggtgtgagaatgaatttctagtacttaaaaacgaaaatttgtattatgatcttatacttaataccacacttcttttgtagagcctgattcttagcaatgcccttagggcgcagatgtgacaccctaggtgtcagtttcgtgttatgtcaggagatttatcttaatctcggatgctcagtgaaaacttctatctctcgatcgtgtctatctctgtctatcaggctttctcatggaagttcaccgaattcggagttattcgatcacgagaaacaaccaattttggagcgtgttaa

SEQ ID NO: 194536 - DNA, 275 bp, Arabidopsis thaliana landsberg
actccagaagaaccaccaccgggtcacgcacaaaaaaccggaatcacgacgcgagaaacgcgccaacggagagaaaaaacgccaaccccccccgcagcacgaggaacccaaccggaaaaaacgaagccaagacgcccgaacccgaaccgccccaggagcaaccgaggaacgaaacaacccgcgagaacagcaaacagggacgcgccccaggcacagaaccggcagacacgaccggggccgacacgcaccacgtggagaagcaagcacaagatgcg

SEQ ID NO: 194537 - DNA, 101 bp, Arabidopsis thaliana landsberg
  unsure (1)..(101): unsure at all n locations
atgatgctgcccaaccccgccaaccgtcgncgtgttcccatcctgcccttcctgctcttcgccggcggcctcggaatctgcctgtactacggacagcagtg

SEQ ID NO: 194538 - DNA, 263 bp, Arabidopsis thaliana landsberg
ggaagaaagctctgacttgccgggcccgcaagacagtgaaggtggagatgcgaggcgcgggagagaaatagcagacggggctgaccgatgggcccgcttcacagttagctgagtgcgcacggtgggaagtgtctggttcgcgggtccacacgcaagtgacgactcactcgcacaagagacttacgaccgggcccagggtgtcggcgccacctcaccaggtgttgggctgtgcagaggagttggccaaatgggccgaaatgaag

SEQ ID NO: 194539 - DNA, 153 bp, Arabidopsis thaliana landsberg
atgagccgtggagagaagcgagatcttcagaaatcaattaaggaactacctgcaaaaaatcttgaacgtgttgctggaatcatcaaaaaccactatgtagctttggggaaagaaatgcctgatgatgttttcgtcatcaacatggaggaggag

SEQ ID NO: 194540 - DNA, 297 bp, Arabidopsis thaliana landsberg
atgttgaaccagagatgctcggcaaggataaacatgcggaaaagggacatatatgtgtgctacggtaattcaattgctgaagccttggaacatattgaaagagaagggatcccaaaagagatcccacagtttcgtcagtataaatgccgtcgttatcctccaagtgctcataagagaaagcacaagataaagtctgtccttagtttcgacactttggacaaggctttagcccaccttcacattcagcctgttggtgcagctttaattactttccctgagttgtggcgtattggagaa

SEQ ID NO: 194541 - DNA, 126 bp, Arabidopsis thaliana landsberg
aaacaaaaagaatgagaaagaaagtaagtagtagtggtgacgaaggaaacaatgagtacaagaaaggtttgtggacagtagaagaagacaaaatcctcatggattatgtcaaagctcatggcaaag

SEQ ID NO: 194542 - DNA, 645 bp, Arabidopsis thaliana landsberg
atggatgcagcggacgcacgaataagagttttcatcaatgaaatggagcttgaagtgagctcaggaccgttcaatgtgagggatgcatttggggaagaggttgttctgattaattccgcgggtcagcccattgtcaccgatgaatatggcgtcgctcttcaccctcttcaacacggagcctcgtactatctggttttgtttcctctctattttcctttgttatactaattaaggttccactatagctagatactactctatcggttaaataaactatggtaaaatgaatacttatttaatgtctatataattatagtttatacatctatattagtactagtttatttcttcattgggatctaaaatggataaatgcatgcgagagacatgttgtttggcttaggtcaacaatgttgactcaatctaatttaattacacacacacacaccttgcgcttctttagagcattcattggggttttttttctttttttggccttcgtgtattttgacttttgtagtataaattctaatactaccatatttcggaggatgtgcctgcatgtgtgtgtatataattgtttatgtgatttaatttcgaggtctcttttctgcttttgcagatctagtcgtgtgggagatttga

SEQ ID NO: 194543 - DNA, 386 bp, Arabidopsis thaliana landsberg
gaagaaatgaaaactagtagagccaggaagaggatctatgaattattgtccaaggctgcagcagcagcaaaaacatccgaagcagaccctgatcaacgagagctgcactttgttttcttccgccaacctgaccagttcttagagtcagatgaaagaaagggacatgtttccggtgtaaacttgcaaaaaaccattcttgaaagtaagtgcaccttagttattctgtagattgcttagctggagacactagaaatagaatggtgatttcttaggatacaatagtatattttgctaacatttcatccatatctttcgtaacttgtaggtgttggaaccggaaagcaaattgcagttggtacaggagagttcgaggatcttaactgcag

SEQ ID NO: 194544 - DNA, 29 bp, Arabidopsis thaliana landsberg
ttttactaccatactctttagagctggcg

SEQ ID NO: 194545 - DNA, 91 bp, Arabidopsis thaliana landsberg
aagatacgtcggaaaaatagagccttctactcaactctacgaatgcgatgatgagaactttcacctccaaaccaaaacgttacaaatttga

SEQ ID NO: 194546 - DNA, 44 bp, Arabidopsis thaliana landsberg
ggttttgcaaaaccaacaccgaagatccaacacgatgggacgaa

SEQ ID NO: 194547 - DNA, 313 bp, Arabidopsis thaliana landsberg
aggcctttgtgagcgttcatccgacctgctgcaggagaaaacgcatcacttcagttacctggagcctgccctgcgcgctcaacggctttctttttttcaagatctctggggttattataacggtaaaatcaacttaacttttgtaccaaagcctgatcagcataatgcgggtggcggatacaccaatgccagccggtttccgctggcaaccggtaaccgtgaagcagatgccagctttgcgaagctgggcatgttgtccaggatcgactacccgaccggtggatacgatagcattcaatacgaaggaaatgag

SEQ ID NO: 194548 - DNA, 396 bp, Arabidopsis thaliana landsberg
gagcctgggttcgtggcggcccccgccggtggcctggggcaggtcgtgctcgagcaggcgctcctcgagcgggacgccgtcgaccccggcagcgtcgccgtgatcgtgcccgactccgcgctggccaccgtggtggatgccttcgaggccgcgggtgtggagttcggacgggcggcccgacacggcctcgaccagcagatcacgatcgtcccggtcagcctcgtgaagggcctcgagctcgacgcctacgtcgtcgtagagccggccgccatcctggaggaggaggtgcagggcgcccgggcgctctacgtgcgcctgacccgggccacgaagcggttggtgctcgtccacgagcgaccactcccctcggtgctcaccgagccgtcctctgggtga

SEQ ID NO: 194549 - DNA, 207 bp, Arabidopsis thaliana landsberg
agattcaatttacagagacaacacgactgtctctctctttgtcgaaggcgatttcgttggagaatctgcgattacgtttattgtgattttgtggtgactgagagttcgatccaccagatgcataatctccagagtcgctttccaccatcgacgacccgagctccgatgatgacaaatcaaaagagttttgttttatcgattctttag

SEQ ID NO: 194550 - DNA, 213 bp, Arabidopsis thaliana landsberg
aaagacagagaccaactccttgaaaaaacaaattgtttttccgagccacgtgtatcacttggatccgacgattattgtgtccggcccattaagatagtcaacacttattgggcttccaaatatcagctaattagacacgtggatctgattctcttctccgtcttcttccgacaagctcgacggcgacacagccaaagaaactacgcatcaccg

SEQ ID NO: 194551 - DNA, 145 bp, Arabidopsis thaliana landsberg
atggtgaatacttccatggacccccacaggtactacatcggcttagaatccattaccataggcacaaatatcactcccacacaagttcctttacccttaagacaatttgattcacaaggaaatggaggaatgttggtcgattcgg

SEQ ID NO: 194552 - DNA, 217 bp, Arabidopsis thaliana landsberg
atgtgccatctcctaacactctgccgagttgagatcgaagcaagtccctgcctaaacaaattcctcgtcaaccatgtgagcaggaagctggcgttttgctatcaaggaaggaggacttgtggcagtatttatcaaggagcaatttggctaggagacaagtcgggttttgtgagaatctgccagctcaacttagaaagaagggcgtcattgaagcact

SEQ ID NO: 194553 - DNA, 363 bp, Arabidopsis thaliana landsberg
atcaaagagaaggagaaccagtccaaaagataccgtgaagagagtgaagctgcaaaaatggtatgtaacattagtaatgcctagcttgaaaatatactctcatgaactttgttcaataatatctgccaacttcgtcaggtggaggaagagagagctctgaagcaaatgagaaagacaatggttcctcatgccagacctgtgcctaacttcaacaaacccttcttacctcagaagtccaacaaggggaccacaaaagcaaaatcacccaatcttagagtgattaaaagaaccgagagaagaaccatgatggctcgaccaaccatctctgcagctactagcgcctctgctggtcagatgagatag

SEQ ID NO: 194554 - DNA, 200 bp, Arabidopsis thaliana landsberg
atggctcacgacgctcttctcagtaagcaaacaattcccatttcttgttccttgagtcttgttaaactaagagatcatcagattatgatattttctcctttctatttttgttcttgcttgttgttagactttcctgaatgggaaactcagattgaagagtggcaagctcctgttcttgctgacacaacacttcctgagtg

SEQ ID NO: 194555 - DNA, 36 bp, Arabidopsis thaliana landsberg
atgtccgtctatacgaaatttgacaaacaacatctg

SEQ ID NO: 194556 - DNA, 782 bp, Arabidopsis thaliana landsberg
atgctattgtgtgaggacatagcagagcagaaggtgctgttgggctcgcaattatctgaagaccaggagaaaaccttgataaggtttttattcaacaacaaagatgtttttgcatggtcggctaatgatctctgtggagtaaatcgggatgttattgaacattcgctcaatgttgacccatccttcagaccccgcaagcagaggcttcggaaaatgtctgatgacaaggccgaaggggctcgcaacgaagtaaaaagactcctaagtgcaggagttatcagagaagtgaagtatccagaatggctagctaacactgttatggtgaagaaggccaatggaaagtggagaatgtgtattgatttcacagatctcaacaaggcttgtccgaaggatgagttcccgctgcccaaggatagactctttagttgatgcagcagcttcttcggaactcatgagtctcctggattgttactcaggctatcatcaaatctggatgaaaaaggaggatgagccgaagactagtttcataaccccaagtggtacatattgctatcttcggatgcctgaggggcttaagaatgctggagggagtttcagcaggatgactgcgaaggttctccaatctcagataggcagaaatgtgttgacctatgttgatgacattattgtaaaaagcacgaagcaagaagaccatattgctgatctgcaggagaccttcgccagcttcagacaagctggtctgaagctgaatccagaaaaatgtgtcttcggagtaaagaagg

SEQ ID NO: 194557 - DNA, 111 bp, Arabidopsis thaliana landsberg
gatcttcttgacaatggtcttctggtacaccgaagtggcaacatcgtggatgcgcttgacgacaaaggtcttgatgacgggagtcacagcttcgacgcagcccttctgagg

SEQ ID NO: 194558 - DNA, 8 bp, Arabidopsis thaliana landsberg
gtaagtaa

SEQ ID NO: 194559 - DNA, 193 bp, Arabidopsis thaliana landsberg
atgcagacaaaggctgaggagaaggaagggtcgccggccaactcttctgccctctgtcactggtcaatgagcagtcgaaaaaatgaatcgattgaaaatgtggtcgggatgattgagagaagagccaaagcagaaataaaaagagaaagaggtaacgaaatgtgtgaagcaacggaaagaaatcccgacgccg

SEQ ID NO: 194560 - DNA, 145 bp, Arabidopsis thaliana landsberg
atggcagtaagcgtcccaaccccataggcgattagaacttgggaatgggttgttggggtacaaattatctccaccatcaacatcttggatcacattgatgctctatggcgtgggatggagtcagagtatcattatgagcgcatca

SEQ ID NO: 194561 - DNA, 203 bp, Arabidopsis thaliana landsberg
gacaaagctatgcagtcgccgattattgtaatagagatgctgactgtaagcgggtatgcttaagaccgtacgcatgcaacttaacccgtcacctttgtatgtgtcatccaaatgatgtcagttcttctaaacaacattgtattccaggacataaaggttgtggaggaggacctccaccacaacgattgaaattatatcgataa

SEQ ID NO: 194562 - DNA, 414 bp, Arabidopsis thaliana landsberg
atgactcggattgcggaagatgacaaagcgtgcttccggcgtagtatgggtacttaccagacgattgcgaagtactatctagaaggaaattacatcgttctttctccagattcggtcaatgaaccgactggaagtttagtttttgtatattttcttcgtccaaacgttctagtgaagaacgatcgtgcagcgattatcaacgctttttgtaaaactttgactcttaataacgcctctctagctgatggagacacgattaaaatcaaagatacgacgtttactgctcgaacgggatctcctgcgactaccactgaattccaaattggtactctttctgcggacactgcaactaaccttgctttcgcgattgttgcttctggaattgtcttggcagccacggcgaccagtgcgatc

SEQ ID NO: 194563 - DNA, 127 bp, Arabidopsis thaliana landsberg
cttccacgaacgaccccagatcaaagccatttccgacggtggcggatacggcggtgagtcttcccggaatcatccgtattccgacggaaaacagtggaataaacaccagaaagatagcaaacgctaa

SEQ ID NO: 194564 - DNA, 335 bp, Arabidopsis thaliana landsberg
attcagcatccgaggcccaaatggtgtccacgagtgtttggttactagaccggcaaggatgagcctttctgatgcaaaaaacggatcctggaccagcctttttcagcttgaagttgctcgagtcttagcggctcagcttgtgcttgctgttcattatatccattcacaaggcatcgttcatggagatcttcaccgcggaaatatcctccttcacctaccccgaaaatttgatcaattatccacagaaaagttatatgagcagtatggagagccggtgttcgagccagttaatcgattagatggccgaaagctcccaccaggcgtcccacaatatg

SEQ ID NO: 194565 - DNA, 142 bp, Arabidopsis thaliana landsberg
atggcatcaccttccaagacgtacccagccacggatggcttctctgctgtgcgcacggagaagcggcatgacgcgcacgatcaacccgaaggatttcggtcgtgtcgcggtgctcgctggcggctggtcgtccgagcgtcag

SEQ ID NO: 194566 - DNA, 717 bp, Arabidopsis thaliana landsberg
  unsure (1)..(717): unsure at all n locations
ggaacgaaagagcgataatttggtttttactgttcgagtttgtgattatggtcctctttgcggctcttgtgaggttctgttttatattctggaagaaaaagaagcttcaagatcgtcccttcagtactttcttggacaagcgagtaagaaaccctagcttgtgtaacaaggatctttaacttcatttacatttcaagaatcctctgttttctagtatctcacagtccatttttcttccagcgtttgctacacaggaagagtagagaaattgataaaacgataacgagacttcaaaacgaatcaacggccaatgaatccgcggttgataaaatcggtgatttgattcaaaagagggaanacgtgaaaaggaaactctcgtcgacctatagtcttgggagagacatagatgagtccaagtctaagttaaaagattatgttcttcccttgtacggaggaagttctagaagcttctcttaccgaaatagggaaaatgagagtattacgatttttcaaacaccaagcgatgagtcatcctcagaagagagctatagggacgaacattatgatgatgtagctgatgatgaacatgatgaagatgacttggaccgtaagcaaaagggaaagttgcttgctcattcagagggttcttccaatgatggtgatggtattgcaagcagtagaagaagcatatatttgaagcatatctttgacgactaa

SEQ ID NO: 194567 - DNA, 496 bp, Arabidopsis thaliana landsberg
atgaatatgagtgatttaggttgggatgatgaagataaatcggtggttagtgctgttttagggcatttagcttctgattttcttcgagcaaactctaattcgaatcagaatctctttcttgttatgggaactgatgatactctgaataagaagctctctagtctcgttgattggccaaactcggagaatttcagctggaactacgctattttctggcaacaaaccatgtctagatccggacaacaagtcttaggttggggagatgggtgttgtcgagagcctaatgaggaagaggaatcaaaagttgttaggtcctataattttatcgacatgggggcagaggaagagacatggcaagatatgaggaagagagtgttgcagaagcttcataggttgtttggtggatctgatgaagacaattatgctttgagcttagagaaagttactgctactgagattttcttcttagcttccaagtatttcttcttcaatcacg

SEQ ID NO: 194568 - DNA, 453 bp, Arabidopsis thaliana landsberg
tgatgggttgtgcttattccaaaacttgtattggtcagatttgtgctacgaaagagaatagtatcaggcaaacgcatcaacaagctccgtccagaggtggcacgagagctactgcggcggcggcggcggttgaggaggataatccggtgtttaatttctcttcagatgcggtggatgatgtagataacgacgaaattcatcagcttggtttgagtagagaccaggaatgggggattactcggctttctagggtttcttctcaatttctaccacctgatgggtcaagggttgtcaaggttccgtcttgtaactatgaaatgagatgctcgtttttgtctcaaagagggtattatcctgatgctcttgataaggccaatcaagatagtttcgctattcatactccttttgggagtaattcggatgatcatttctttggggtttttgatgggcatg

SEQ ID NO: 194569 - DNA, 65 bp, Arabidopsis thaliana landsberg
atgctgtcccccacgaaaacacaaccaaaaaaaggaacattccattaccgaacatgtctcgcgag

SEQ ID NO: 194570 - DNA, 98 bp, Arabidopsis thaliana landsberg
tcaatgatgggcctcatgttggtgctggccgcgattgtcgctgggttggcgacgatgccctgacatcggagacgatgtaccccttagtgcatacctga

SEQ ID NO: 194571 - DNA, 232 bp, Arabidopsis thaliana landsberg
atgaccttgatactcaagcaactgttcgcgtttttgaagatgctgaattcagagacgggacacaaccaaatcgcggccggcatcgccgcgggtttcattctcggaatgacgcccatgctgtccctgcagaccctgctggtcttcatgtgcatcttcttcttccgcatccaggccggcgccgccttcctggccgccttctatattcgccttcaacgcctggctgctggatccg

SEQ ID NO: 194572 - DNA, 1303 bp, Arabidopsis thaliana landsberg
gagatcagttttgaggacaaaaccttttgaagagggagggaatgatgcggacatcaaccttacttcacaaaccgctaaactacaacctgtaccacatcctgtactacatcctgtaccagaagtcccggagggtatcatgacacgttcaaaggctaaacaactgaggaaaaggttcaacttagctgtgcaagatattttgagctccctagagctaggagtaaactggtccgtagcacctcataccggatatgatctaatagccgaagaagagcttgctgaagcatttacccaaatgagtcttgaacgaactactgcccaggtatgaaatatcgtttgacaggttcaaggacctctagaaaccaagagaagactttggagcttcaagagatagacgattcaagtgtcacatctgaaagtgatcgagagagtcaagatcgagagcaagacatcaaggacatggaaaagcacgaagacatttatcaagctactcaagaggaactccagaaagacccctacttcaagtaaccagccagcaaacaagcacaagacttgattccagaagtacctcaagaagtactacaggaagtgactcaggcgtcatctattgggcctaaaacgcatctaggtaaggtttattcagtttatattatctttgcaggtccaaaaagcccagacaatggctagagtcaccctcaatcgtgctcctcaagagaacttaattagtttccttattttagcttattttctttcaaaaaacaatggtttttgtgttttgattatatttgcttccttgttgcatttttacatttaatttcggtcctagggctagctgaaggactcttataaagtcccccggcagcagttgtacgatttttcacacttgattatcaataaagaaccaaattttcttacttcttctatttaagtgttcttgagagaataagcttgttctttgtcttgtgtgtgcgatttaccaagactaagttcttgtactgtatcagagacttatcacatttatgtggtgtacctcaatccgccagcacttccccctcctttcgatcccacacgagagaagagatcgccatcgtgtcagatctacatcatcccttcacaagagaaaaacgaccgccagcttgtgaagcgaccatctttatcagatacaaggcttaccaccgagtcgtgtatagcttctccggtcactagcaaaaagagccgtgaattggatatacatatcaaattagtttttaaggattttggaattgaaaaacgagagagaaataaatcgtttgcaataacaagaaat

SEQ ID NO: 194573 - DNA, 111 bp, Arabidopsis thaliana landsberg
acgaagaactcgttcgttactatctgaaacgaaagatctgcaataaaccttttaagttcgatgctatctctgttaccgatgtatacaaatctgagccttgggatctcccag

SEQ ID NO: 194574 - DNA, 253 bp, Arabidopsis thaliana landsberg
gcattaccgcaaaggttatcatgtacaatggcatcatgccttgcctgaaagagtaggagacaatgatgagacagccgcagcggcagaaaatgaagagccaggaacaacggcagaagaaaaaatgtttttggcagatactgatcctttggccccttcactgttggagctcgaagatccgatttttcaatccaggtctgctcccgaacaaaaagccagcaaaagcgctttgcttgcccaatcaacttcgcacccg

SEQ ID NO: 194575 - DNA, 166 bp, Arabidopsis thaliana landsberg
atgatggtggccggcaacaggcgcggctccagtgatggtagtggtatgcgactgcgctactctgacaacgacgtagcacccaaaacagtgtggctgctctgatagcggtggcagcggatccgatggtggtgatagttccggcaacggtggttgtggtggtggttag

SEQ ID NO: 194576 - DNA, 73 bp, Arabidopsis thaliana landsberg
atttgtaggagcaaataagaggcaaaagttttatcgtccgtccgtccgtcgctgtggtttccgaggagagcgg

SEQ ID NO: 194577 - DNA, 457 bp, Arabidopsis thaliana landsberg
tgacttgctgcaaagcgagtttataactgaacctagagataatttggaagaacgtgaagcagcaatcgagcttcgggacagaatcgaggaacaggagtcgttactcgagttcttgttactgattcaacagaggaagcaagaatctgcgtatagattgcaggatactgtttcacttctttcttctgacattgagcaagttgtaaagagacagttaattatgaagaaaaggggaagctcactctctgatttcagtaaagatgatcatcaatatacctctggtcagccattgatgagtttccaggcaaacgaggagccatcagcattcttggcctcaagaaaacgggttagacaagggattctggcattggaaaacggtgttgaagttgatgaagagagtcaaggaagcacacttcttgaaagctcccggttgatgagaaacttcatgaaactagaatcg

SEQ ID NO: 194578 - DNA, 154 bp, Arabidopsis thaliana landsberg
atggcaatgtctgttgttgagtgtgacttgcttaaggtaatccaagagggatatgagaaagatgctgagttacttgccattattaatctgttgaagacaaaggctgatgggaaaaagaattatgcttggagtcaggaaatactacgaaggaaaa

SEQ ID NO: 194579 - DNA, 151 bp, Arabidopsis thaliana landsberg
atggttgtgatgttatcacttcttgaagatactaaaggtaataatgattttgcaatggctccaatttcagagaatgggttgctaccaaatccaatggcttgtgtgaaagatgcaggaaaaattccagattgtgtagaggcaatgaaacaag

SEQ ID NO: 194580 - DNA, 45 bp, Arabidopsis thaliana landsberg
acatggatcgtgtacggtacggaccgtgaagatcggtcgttgtga

SEQ ID NO: 194581 - DNA, 47 bp, Arabidopsis thaliana landsberg
accgtatcagtggacggatatgatagatacaagccggacgccagtcg

SEQ ID NO: 194582 - DNA, 301 bp, Arabidopsis thaliana landsberg
atgactctaaactcgattcaacgcaactcaaacaagcttcaattcgcagaaactcaagagatcaatcaaagaacgaaagcaagcaaagaacaaaacaaacacacgattgtttacccagttcggatcaccgatgtgatgaacctacgtcttgggtcagaatcaatccagcaatccactacgaatcaatgtttactcaagctcaaaacccagagctcaagatcgtttacaagagagaagaattgagataagaattttccgttacaacgaacaattgaagaagacgaagactatttataacaga

SEQ ID NO: 194583 - DNA, 225 bp, Arabidopsis thaliana landsberg
atgagcctcggaatcggaagcgtggagctgggctcgctgctcatgcccgaactgctgaaaggagggggattagaggaggagggcctcgcaccgggtataccgcatttcgcgcccaaggacaagcgggtgattaacctgatccaaaacggtgcgcccttgcagcaggagcttttagattacaaaccgaagcttcgcgagatgatcgggcaggaaaaaccggcttcg

SEQ ID NO: 194584 - DNA, 425 bp, Arabidopsis thaliana landsberg
gaagtcacctatacctacgccatgcagaccaccggcgctcaggctacgaccgtcgtggttaagggcaagcgcgttcgccaggacttcaacaagacgacgaccggtttgcaggtcgatctgaccacgctgacggcgcaacaaccgatcggtcgcagcatcgaagccgtgaccttgctggcgccaacggttgtgaattcgaccgcctttggcgagccgtcgatcggaggcggttcagcagctgaaaacgccttctatattaacggtttgaatgtcaccaacccggacacctatgttggcggcgccgaagtgccgttcgacttctataagacggttgatgtccagacttcaggttctccggctgaactcgggcgtgcgaccggcggcgttgtcaatgcgacgaccaagaacggcaccaatgatttcat

SEQ ID NO: 194585 - DNA, 177 bp, Arabidopsis thaliana landsberg
atgacttcacccacccccattaatggaggagacactcgtttcagttttgactacctttcccacgagggttttccctccatcttgtgggaggtgctctgctccgcaggttaccctacaccccctctgtacacggtgcagctatatgaggatcatcggttgccacgttgcaggggttga

SEQ ID NO: 194586 - DNA, 435 bp, Arabidopsis thaliana landsberg
atgcggtttctgtatttgacagataactttttctctggttccttgcccgcctcacttggtaacctgatcaatatggtggcgctaaagttggagaataatcatgtatcgggccctatccctgagtatatgggcactttcacgcagttgcgtatcttgggtcttgatagcaacaaattcacaggcacgattcctctttctctggcgatgttgcctcacatggaattcctgttgttatttcgcaatcatctcgaaggaagcatccccaaaaaaatatttacaaacaacattcacgcagttgcgttgtattctaatatgctgacggtgagcatccctatggagctggagaattgcgatcgacttatcctgttgcgactatatgacaatctgttgaccggcgtggtaccggacaaccttacgcgtttgaaggaccctcaa

SEQ ID NO: 194587 - DNA, 362 bp, Arabidopsis thaliana landsberg
  unsure (1)..(362): unsure at all n locations
aagaaagaacaaccattggctgcaaaggagaaagctgaagggcaaaagaaacaaagaatagtcaacgtgatgcaagccattgagcgaacaccgccttcggcctcaacgggcaaaatgataactactgcaagtgtcgaagccgaagctgctgccgaagctgcaaaactcgcaaccacaatgtcaagaattgacaagcttatatcagatatggttgctgaagagacagctacggctgcagatgaaagcatggccgcaacgcctgataaagggaaaaaagttgttgatacttcttcgggagagaaagattttgaccttcggcacctgggtggccaggaactgtccgaggcagacaaggangagct

SEQ ID NO: 194588 - DNA, 300 bp, Arabidopsis thaliana landsberg
gtcaccatcggcccggtgatcgagaacggcttctattacgacttcttccgcaacgagccgttcacgccggaagacttccccgccatcgaaaagaagatgcgcgagatcatcgcgcgcgacaaaccgatcaccaaggaagtgtggacgcgcgacgagaccaagaaggtgttccgcgacaagggcgaggccttcaaggtcgaactcgtcgatgcgatcccggccgaccagaacatcaacatctacaagcagggcgactggttcgacctctgccgcggaccgcacatgacctcgacgggcaag

SEQ ID NO: 194589 - DNA, 214 bp, Arabidopsis thaliana landsberg
ggattgcacgcctgagtgtcttgacgcatccctggtgaagggaaagattttggtgtgcaatagatttcttccctacgtagcctatacaaagagagccgttgcagccatttttaaagatggttcagactgggcccaaatcaacggcttacctgtatctggcttacaaaacgatgactttgagtctgtcctctcttactttaagtccgaaaagtaa

SEQ ID NO: 194590 - DNA, 240 bp, Arabidopsis thaliana landsberg
tctgatgagcgtgtaacagcgataaaaaaccagttaaacactgtgttggaaaaactcatcaataagcgcggtgtggtaacgccctctgagaccgatgaggttttggaaaagctaaacgaatccaagcgcataaggctgggcaatgactttgctaaaagcattaagtcagcagccctttaccttgtattgtttgcagccattggcacaggcatttatttttatactaaatccaagcgataa

SEQ ID NO: 194591 - DNA, 195 bp, Arabidopsis thaliana landsberg
catattcatggacaccggcaaccggtctagacaatgattcagtagccgcgccaacagcatcacctgataccaccactacctacaccgtgagcatcgatcagaaatacggctgtcctgttacccgaaccgttactgtttatgtcagcaatatttcgctcaatgtaaccagtgatgttaccggcagcagctgcacag

SEQ ID NO: 194592 - DNA, 186 bp, Arabidopsis thaliana landsberg
atgccatccgttatggtgcgctcacttataacgacaaaggcgaggccgtgggcgagcattatcatgatgctgaaaggcgccaactcttcgcaggtcatcgacaatgtgaaagaacgcgtcagacaaattgaaaaaacattgcccgaaggagtggtgatcgaacctttcctggaccgcgaaaagctg

SEQ ID NO: 194593 - DNA, 247 bp, Arabidopsis thaliana landsberg
agtgtagaaccttcgtgctcgtggcacaaatgttagttacttgtggtgtatcagctgaagacgtggaactaatctataatgcggtggtacgtggtaccagtgatgctagtggaagtgaggcttatgaaaagcattctatcgattgtgctcgtataagaagggaagaggaagcacaagcaccgaaagaagagaggacacttatagtggtcgtggagcttctacttctggacactaataagaacaagag

SEQ ID NO: 194594 - DNA, 851 bp, Arabidopsis thaliana landsberg
atgttgatgatgttctctccagcatttgtaatggtaatggacctaatggtgatggttatgatgataatgatgatggtatcatcgctggatgcgcatgggcatagaagttgcatcgaaagcgaaaggaaaggactgctagagctcaaggcatatctcaacatatccgagtacccgtatgattggcctaatgacacgaacaacagcgactgttgcaaatgggaaagagtcaagtgtgatcttaccagcgggcatgtgattggtcttctcttgactgacacatactatcctcctcctctactaaatctttccttgttctatccatttggagaactacaaactctaaatttaagtaatttctggtgtcaaggctggttcgatcatatccatggtatataaatgatcttttacttccctttctattaacaattttttagtctattttttttcaaaaacacataattataagccatcgtcattttcaagttaacatcattgggttttatacatgcaggttataaaagctttgagagattgaaaaatcttgagatccttgatattagtgaaaacggcgtcaataatactgtcttaccgtttataaacacggcttcttcgcttaaaactttaattcttcatggaaacaatatggaaggtacttttccaatgaaaggtacgtacgtccactttcaggtcttaataagttcaatattaaggtctcgtagtcatagttgatgagtacttgttactattcttgtattaaacttgaggaacctatatattttcagaacttataaacttgagaaatctagaactgctggatctaagtaagaaccagtttgttgggccagtgccag

SEQ ID NO: 194595 - DNA, 51 bp, Arabidopsis thaliana landsberg
gctcttgttctcatgtccggcgccttctttcctcgtggcctgcttgttcag

SEQ ID NO: 194596 - DNA, 18 bp, Arabidopsis thaliana landsberg
atggctttcagaatcacc

SEQ ID NO: 194597 - DNA, 182 bp, Arabidopsis thaliana landsberg
ttttgttcttctcgctctgtttaccaaacgcgccgccgtattcaccacgtcggggatggaggttccgaagacggagggatgaccggaaaagagaaagaagagaagaagaagacatgatgatagatgagacaacgttacagacatctccacgtctctgtataattttgattcaaaaagaataa

SEQ ID NO: 194598 - DNA, 150 bp, Arabidopsis thaliana landsberg
ccaaacgggacatttgctgagtacgttgatgtgtactcatccttgctttaccaccaaacaccaggttgtccacattgcaaccactgctcaggagaagacgaagtcatggaaggagacttccaggagttccaagactacgacgaattctag

SEQ ID NO: 194599 - DNA, 858 bp, Arabidopsis thaliana landsberg
acccgtcggagcaagaagcggtctaccgagttctcgactcagtcaactcagccatctcatggcgaaccatcttccccgacgacatctgcgcttcaccacctgacggcgtcgtttgcgataacctctacgcttctcaaaacggcgtcgcaacgtctgttcacgtcacggagttccatttaggctacctctcggattacactcaaaaccctccttgctcttctaatgccacgcttgatcctctcctctttactgctttcaaacaccttcgtaagcttttcttctacaaatgcttcaccgacgctcgtgcctcgttgccgttaacagtcccggaggatttcggctctgttctcgaagagttggtgttcatcgaaaacccatctctcgtcggcgagatcggagccatgatcggtaatttcacaaagctgagaagattagttcttaccggtaacgggtttcacgggtcaattccgggtcaaatcggcgatttggtgagtctagaggagattacactctccagaaacagcttgaccggtgggtttccggcgaacgcaacgtctcgtctgaagaatctaaaagttctagactttagccataactttatcaacggaaacgcccctgattccatcggagacttgacagagcttctcaagctagacctcagcttcaatgagttcaccggagaggtcccttccggcgtcggaaatttgaaaaagctcgtatttttagacttgagttacaaccgtttcgggaatttcggcgttcctctgtttctagcggagatgtccagtttgagagaggttcatctgagtgggaacaagctcggtggtcgtataccggcgatttggaagaatctcgagg

SEQ ID NO: 194600 - DNA, 14 bp, Arabidopsis thaliana landsberg
gtagagacgcttga

SEQ ID NO: 194601 - DNA, 138 bp, Arabidopsis thaliana landsberg
aacccaactccactaatttacaatagatctaaacctaattgtcactcttatgggttccaagttgcagacagctgtgtagagattactactggaacctgcaagacgcgtaaacacaagtccacaactacgtttcagtga

SEQ ID NO: 194602 - DNA, 1083 bp, Arabidopsis thaliana landsberg
gaaacccagagcacgacgttatcaagacgtgtttactctcgggaatgggtgttgtttctagcgacacgacgatcgttacgattcgtaaaaactcttcggaacgaggaatcacgacgagagctaagtttttggcgtttaggattttcactgacgctgttgcgaggaaacacggcggagatgctaatgtgaaatatggttggtacgctggttctagagatgagattcaaagaatcatctcttacggatttagcaatcgtgatgttggaaaatttgaaaatgatggtggttctcatggaattggaatccatttggttccttccaagtgttctctacttgcgtaagcctgagatctctctactgattttcgtcgtaattttgagctaataactcggattatagctagtttctgagaaattttgaattgattttgatttataatcaacatgagtttaactaggtttgtttttcttattgtgtgtggtggtgatgatgtaacagtgaaagctatttttgcagggcttcagctacagagcaagatgaagaaggtttacgatatcttctgttatgccgtgtaatcttagggaaacctgagataatcatctccggctctaaacaatcgtatccgagttctgctgagtttgattctggtgtggatgatttacacaatcctagaaactatgtgatttggagttgtaacatgaattcgtgtattcttccgagttatatcgtcagttttaggtctcctagactgagaggttataaacactttctttctttaaggtctcttggtattggtgattacatagtgctaaaggattggttggtgtatttttttcagtgagtagaggtggttttgcttcgagaccaagctcgccgtgggttagttttgcttccttgatgtcaatgttgtatacatcaatggatccttcaagaatgaacttgatcatccgaacttacgatgattttcgggtatgtaatccagtttccttactgtatgttctgttctattattcttgaagttcgtttttttagattcaatgtgggtttattttgcagaagcggaagattaggagagaccaattg

SEQ ID NO: 194603 - DNA, 388 bp, Arabidopsis thaliana landsberg
cctgcagacatcatcaaaacccatcatttagcaaaaacttgtggaacaaccgacaaagaaaatcgacaaagaaaatcgattttcgagtaagatcaagttttggttaatggtattgattttcgagtaatacaggcgagagagtcgggttgagctcatgtacatatagagttattagagctttgaatcgatggtgtgaagagtaagtttctttacctgacaacctcagctcggcgtttagcctgttcagcaatctgagagagttcactgtaactattcttttcgttaaagatgttgtttttctctgctggttgaagtccgtggagggttctttgagctgcagcccatagagcttctctttcctctttcccatagtctttcttcgtcgtga

SEQ ID NO: 194604 - DNA, 191 bp, Arabidopsis thaliana landsberg
atgcacctcaatcccaatgtattcgcgtgcggcatcgtgttgtctgtcctgcagctccccctcaccattgcgcttaccagtctccatcacccgcggttcggttcgaccgataatggcgtcctgatcacgcgcctgaccctggttatcctgaccatagcgcgcacagtcccgccgcctgcgcgcttaaaacc

SEQ ID NO: 194605 - DNA, 345 bp, Arabidopsis thaliana landsberg
atggagagtgtaagagagagttcattatcaagcttgatgcttttcttgttcggtcttgcttatgttgtattcttgctaaactcaaactgtgttaatggattacgagacctaaaggagagagatgcaagcgagagtaattttgtgaatgctacttcttcaagcgttttggactctaaaagtactgccaacatttcgaccgttgagtttgaaaatgctttagatgatcagaatgtaaataagactgaaaaatgtgaatcacgagcggaggcggaggaggaggtggtggtggaggtggaggaggaggaggaggtcaaggcagtgggggcggaggtggagaaggaaatg

SEQ ID NO: 194606 - DNA, 170 bp, Arabidopsis thaliana landsberg
atggagcgcatcgccatgagcctggatcttcagctggagatgttggacgagcggggctatgtgttgctccccggtgtgctcgaacccttgcgtatcgccttgctgcgctgcgccatcgatgacctgcagccgatccactgggattaccaggggctgctggagcactacaa

SEQ ID NO: 194607 - DNA, 104 bp, Arabidopsis thaliana landsberg
atggcgcctccacaatctgatgaatcacctgttgacatggaaggtggccaagctgatgatgagccagagatacagttccccccccccttcttctccctagctag

SEQ ID NO: 194608 - DNA, 54 bp, Arabidopsis thaliana landsberg
ctagcagttggaaacatcagacggttgaataaaatgaggaagaaacatctgatg

SEQ ID NO: 194609 - DNA, 128 bp, Arabidopsis thaliana landsberg
agcttatcttcgacaacaattttaggtttccaactgctcgattttacattcttgtgctttgcaatgggttgatttatcttattgcatcgggaatcagaaaggatccaacatgtaccacaaccacatga

SEQ ID NO: 194610 - DNA, 131 bp, Arabidopsis thaliana landsberg
gttgtcttcctccattgatgttgtcgtgtcgttggaggcttcctggtgaacggcggacggtccgcgtgcggtggccggacggtccgcgcctggtgcaggttgtccagaaacttcctggtgaacgacggacg

SEQ ID NO: 194611 - DNA, 46 bp, Arabidopsis thaliana landsberg
atggccctcaaagtcaagaaaatccaggtagcgcagtgcgtacaca

SEQ ID NO: 194612 - DNA, 145 bp, Arabidopsis thaliana landsberg
gagctatatgatgagaatgcaaacactgagatgtccattagtcaatcccaaaatagaaatgagcataatcatccatccttgatcaccatacttggcagtgaagtagaattccggaatgaggaaaaaacgcaacaaaatcgcaact

SEQ ID NO: 194613 - DNA, 400 bp, Arabidopsis thaliana landsberg
ttgcgtaatgtgaagtatgaaacactgtttccgagacttggttttctagacgaggcgttgtatcttccatttcaagatagaaagcctaatcagttggctcttggagatgggaatcagttggcacttccgggcaataaggaggctgaagaagtcctctcccttcctcttcctgagactgtgatatctcagatcactgatattattgatggaagcactaaacaggcaggctttgctagcagattttctggtttgattgtcctacttttcggcttttgtgttactatgctttctgtttgcggccttttcttttgccgattaagacagagtatgcggatcaaggaaccttatgtatctgaagtgccaatcgtaacaccgaagaagaaaaagtccaagaaaaatg

SEQ ID NO: 194614 - DNA, 79 bp, Arabidopsis thaliana landsberg
atgagccgtagattttggaccgtgtcggacactgtcgatgagcggatccggtttgcagcaagtcgtgcagatgatggtg

SEQ ID NO: 194615 - DNA, 374 bp, Arabidopsis thaliana landsberg
atggtgagtggcttattgattgaaattgaagtctttgatcttggattatagatgatgctaaagttctgttgttgtttttctgaatgcagattgggcagggtacgtatagtagtgtgtacagagctcgtgatctcgaaacaaaccagattgttgcacttaaaaaggttcggtttgctaatatggatcatgagagtgtcaggtttatggcaagagaaattatcattataggtaggcttaaccatccaaacgttatgaaactcgaaggtctgatcatttcaaaagcttcgggaagtatgtatcttatatttgaatatatggatcatgatgtcgcaggccttgcttcgacccctgggattaagttctctcaggcacag

SEQ ID NO: 194616 - DNA, 165 bp, Arabidopsis thaliana landsberg
atgaacgtatgtgagctcactcttgctgtctcacaccccccaggtcaagagcaggtaccacaggatgaggcgcgtggaggatgctgcgatgtgttcgtgagaggtctaggtcgtcgtttcccagtcaactttggtttgctggaccgttgtctccgtataatgtaa

SEQ ID NO: 194617 - DNA, 36 bp, Arabidopsis thaliana landsberg
atgggcttatacaggtactccatgggcacgcttcag

SEQ ID NO: 194618 - DNA, 110 bp, Arabidopsis thaliana landsberg
agccaactttgggagcaggttcttttgcccgtatgggcttgggaacagtggagataagagagagtcagataaagagagagaagagaatgagtaaaggtggtgcatgttaa

SEQ ID NO: 194619 - DNA, 116 bp, Arabidopsis thaliana landsberg
taatttcttatgtgattcacaggattatctacgatatgtgtgtccagagatccgattattcacagcagctttatgaaaagtatcgtaaagtaattgaagattatactatccaaacg

SEQ ID NO: 194620 - DNA, 306 bp, Arabidopsis thaliana landsberg
atggtggtggttgtcgtcgtctatttcaccagagaaagtgagaaacacatgcatatttgatcacaccagcaactgaccccattttgtcatgtacttggtgaaagtgaaagtactgaaagcaatttcttctcacacaagtgatgaacatcaagctcttgggattatccttgcaatctttgcttacaagtaacgaatgggggtctcaatgaaaccaaactcttcaccttagcaggaaaatatcgaaaaaatgtgttacaacgtaagcaagcaacactgagttatgacttttcttttgccaataattga

SEQ ID NO: 194621 - DNA, 89 bp, Arabidopsis thaliana landsberg
cgtccggccccgctcatcatcatcacaacgccagctcgcctcgatcagcaaaaacttaacaataccagtggatgtcgcgcgccttacgg

SEQ ID NO: 194622 - DNA, 471 bp, Arabidopsis thaliana landsberg
  unsure (1)..(471): unsure at all n locations
atggggccggcggccatcagcagagcgccgaaggtgaggccgtacccggcgaccagccactcgacggcggagtcgccggcgccgaggtcacgctggatcgagggcagggcgacgttnnnnnnnnnnnnnnnnnnnnnnnncaggaaggtgccgctcagcagggcggcgagcgggagccagcccggcgcggtgcgcgccgcggtcggcagcgctcgtggagaggagagagtggtcatggcaccgttctcgggcctccagcaacgggagagtcaagagccggtccatcccgttgaccctcccccggggggagacagcagactggccggcatggacggcctgctcaccatcggcgacttctcccggatgacgttcctctcggtgaagaccctgcggcactaccacgacgtcggcctgctcgcgccggcgtacatcgacgacgccaccagctatcgctactaccgcgccgaccag

SEQ ID NO: 194623 - DNA, 481 bp, Arabidopsis thaliana landsberg
cgcctggtttgacgcgttgcaccgtcggcagcggcacaagtcaccgtccgtcctgcaacgcaacgcgctgcgcatcgtcgctgcgcctgcggcgggtgcacgcactgggccgcactgtgcgtggatggccggcagcatccggggttgagactccgttcatcctttgttagggtaaaaaggaacatccccccacgcttggtggcggtggtgcgttgcgtgcgttaggtcgggcgttgcgtgttgctgtagccatgtgggcggagacacccccacacaggcggaggccaatgcccaagatccgggtcgatcacgtcaccaagattttcggcaaacacccgcagcaaggcctgcggatgctggatgcgggcaaggacaacaaggacattcgcgccgcgggccacgcggtcggctgcgccgacgtgtccttcgaagccgaggaaggcgaaatgctggtcgtgatgggcctgtccggcagcggcaa

SEQ ID NO: 194624 - DNA, 162 bp, Arabidopsis thaliana landsberg
atggaacaaacaacacacatgactgaaacaaaacagcacaagtgctctttgaaatcatcaaagtgcatgtacatgagttgtctcttaaaacaagagttttattcaaacgttgcacgtgtggtgacggtggaactagatccttctttgttaccattaaagccg

SEQ ID NO: 194625 - DNA, 102 bp, Arabidopsis thaliana landsberg
ggtgcatcatcctctgatttgataggcgacatcttcatccaaggatgcaagacgacgacaagcggaaatgccctgtccaacgagacaaagagccgtaattga

SEQ ID NO: 194626 - DNA, 362 bp, Arabidopsis thaliana landsberg
atgctgggcgagcgcaacctcgccgccaaggaccagggccagcgcgagcgctccgtgcagtacgtcaaggacgtgctgaccatggtgagcgagctcgaaggcgagatcatcacgctggtgccggcgaccgtcggcaaggtcgtgccggacgcctcccccgaggaagagtggaagtgggtcgtcgacgccacccgcgagtgcttcacccacgccaagaaggtcggcgtgcgcatcgccgtcgaaccgctgaaccgctttgagacctacctcttcaaccgcggcgaccaggccatggcgctggccgacgcggtcagcaccgagtacggcgtctgcctagacgcctatcacatccacatggaaga

SEQ ID NO: 194627 - DNA, 668 bp, Arabidopsis thaliana landsberg
cacaactacaagtcggagttagcgttagaaatagagtcgagtccgaaagagagggcgaaaaacaaatcacaagcaaataaggcggatgacacggtgatttgttttaccaaggttcggttcttgcaaacctactcctcgttgaggtggtcacaaagaatgattctctttcacccctttccctctctcaaacggtcacctagaccgagtgagcttttctcctcaatcaattggtacacttagtccacacaaggaccaccacacaattggtgtctcttgctttgattacaaagatgttgagaacaagaaatgaagaagaaaagcgatccaagcacaagagctcaaagaacacgggcaaatctctctctcactagccactaattgctttgagtgaaattgggacttgggagaggatttgatctcttgtttgtgtcttgtattgaagtctagagctcttgtattgaatgcaatggctgaaaacttggatgctttgaagtggtggtggttgggggtatttatagccccaaccaccaaaccaaccgttggggttgggctgctgtcgatggtcaccgacagtccggtgcaccagccacgtcaccgaaccgttagagttcgaccgttggagctctgacagcctgggccaccggacagtccggtggtgcaccagacag

SEQ ID NO: 194628 - DNA, 602 bp, Arabidopsis thaliana landsberg
atgataagttcaaaatgtagcacggattgtgatgctgaggtttcttcttcagggaataacttagacgaagactgcttatctatcgttgaaaataaacagttgcttgagaaagatagaaatgacaaagagactgaagtttgtttgtcctctccagaaacgactacttacgcttttgctaaacagagacatgcttttgctggtgcgttggcaggcataagcgtcagtctttgtcttcatccacttgataccgttaagacaatgattcagtcatgccgcttggaggagaagtctctatgcaatactgggagatcaattatatcagaaagaggtaaaatgttttacttgtgatgatcaaaaaagggagctttctgtatttgtttgtcactgcgccttgttgcttaacataattacatcccaatatgtattcaggtttttctggactttatcgagggattgctagcaacattgcctcatcagctcctatctctgccctctatacgttcacttatgaaaccgttaaaggaactctgcttcctctttttcctaaggtctcttttttctcgcatgtctccattcttctgatggcctgtttcgcagaataa

SEQ ID NO: 194629 - DNA, 214 bp, Arabidopsis thaliana landsberg
caccaaccaaacaaagaggagcgggacccgacatagagaccaccgcgacaaagaaagagaagctgacaagaagcggaaacagaaaggcaaagaggacaaccggaaaagcatctcagaccacgtgataacatgggtgcatgcacaagagaaagacgcggcgtcgaaaaacaggcagatcttaagaagaacgcagctacgtggatcccacacgccg

SEQ ID NO: 194630 - DNA, 1164 bp, Arabidopsis thaliana landsberg
atggttgctgcagcaaagattatgaatgcgactcttgttcttcctctactcgaccatgaatctttctggactgacccgaggttttatctcatttactctataacaagatattatccaaaaaaagaagtggaatttgaagagatattctttgtgatttgcagtactttcaaagatatttttgactggagacacttcatgaacgtattgaaagatgatgttgacattgtcgagtacttacctccccgatatgcagccatgagacctctcctcaaagctcctgtgtcttggtccaaggtctgtaccttgtttctaccattcctaaaaacagattttaggggcttttgtggttaaaagttttgtgcttttacgcaggctagttactacagaagtgagatgttaccgctcttgaaaaaacataaggtgataaagttcacacacactgattcacgcctggccaacaatggcttgccaccatcaatccaaaggctgagatgtcgtgctaattaccaggcattagggtactccaaggagattgaggattttgggaaagttctggttaataggttacgaaacaacagtgaacctttcattgctttgcacttgaggtactgtgatgtttctttttgcatcctgcatttgcatttttggggacacaggtttgtttaaaaatgagaatttgaaatgcagatacgagaaagacatgcttgcctttacaggctgcagccacaatctcacagctggggaagctgaagagctgagaataatgaggtacaatgttaaacattggaaggagaaagagattgacagcagagagagacggatccaaggcggttgcccgatgtctcctcgagaagcagccatatttcttaaggcaatgggatatccatcctcgacgactgtatacatagttgctggtgaaatatatggaggaaacagtatggatgcttttcgagaagagtacccaaacgtctttgctcattcatacttagcaactgaggaagagttagagccctttaagccataccagaaccggttagctgcgctggattacattgtggcacttgaaagcgatgtttttgtatatacatatgatgggaatatggctaaggcagtacaagggcaccgaagatttgaagggtttaagaaaactatcaatccagacag

SEQ ID NO: 194631 - DNA, 616 bp, Arabidopsis thaliana landsberg
gtgaaaccactaaaagagcttactttcaattcgcacaatataatagctacaatgacatctcgacaattccaagttatgctggatgtgttgaccaaccttctctttgcaaggcttccaaagtaagtattaaaacctgaataaagttaaaagggtaacccacacttttcatgccaattttgtccattttcttttgcgtcttgctgtaatcagcttgaaataaacataagtaattttttgaatccatgtcactgatgtttagaatccatgtcagtgcagttcgctgatgattagggttaagcttcaaatacatttttctctctgtctatttttgaacattttctagcattgaggagatccttttatgatccaggcctcggaaaagtagtctccaatgtcccacggaagatgaagatgttgaagaggggctgatgaggtagttccgtatggagttgaagaagtggaacttgcaaaaatcaaccttgaagagaaagagcgggagcgaaagttgcttcttgatgatattaggaaattgtctccttgttcggacaacatggatgacacacatatcgaaagggaaggtgaattgtggatgattagtaccagaagatccatactg

SEQ ID NO: 194632 - DNA, 148 bp, Arabidopsis thaliana landsberg
atcgtagtacccgatcccctactcaggcaatacctccttatattaaaaagtatgtcgctgctaaaaccaaggataaagtctttgttcctccaccctacaagccttcactacaatttcaaggaagattcaataagcaactgataaagaa

SEQ ID NO: 194633 - DNA, 62 bp, Arabidopsis thaliana landsberg
aatcaaaccaaagtaaactcaatatgtttgcaatcggagtatatgttcagtggaaagcaaag

SEQ ID NO: 194634 - DNA, 87 bp, Arabidopsis thaliana landsberg
aggtggatgtatgtttgcactcgcataaataacgatctggttgaggagtccgaagaactcgcaggagaagaccttgagaagcagctg

SEQ ID NO: 194635 - DNA, 246 bp, Arabidopsis thaliana landsberg
atgggcaaacaactactcctgctgcttactgcgatttttcatttacatgctgacgccgctacggtcagcggcaccattacacaaaaggacggtaccgttcttcccttttcatccatacttgtcaaaggcaccacgcagggcgtgtctgccaatggtaaaggacaataccagcttcagcttggtcccggtgagtatacgctggtgtgtcagtatatcggctatcagtcccgggagaaaaaaatacag

SEQ ID NO: 194636 - DNA, 128 bp, Arabidopsis thaliana landsberg
aggaggaatacatatgcccaaacaaggaaaactcaagtcggcagacaactaaaagtctccgaagacattgccggagaaaaaaagaaattccccggaaaacaaatccctatctaagggaaccagggtaa

SEQ ID NO: 194637 - DNA, 279 bp, Arabidopsis thaliana landsberg
cgcccgtccgccgttgcacagtggatgcgggcaagctcatcccaaggaacgccgatgaacaccgcaccccaagacaaccgcaacgtcgtgaccctggtcatccagcacaaggtccgcgccgcttcgctggcggcctacgaagcatggctcaagcgcacggtcagcactgcgcgccgccagccggggcacgtggacgtcaacgtcatccgcccccacgcccccgggctgcatttcaccaccgtgaagcgaatcgctgatgccagcctgctgcaagcctgg

SEQ ID NO: 194638 - DNA, 427 bp, Arabidopsis thaliana landsberg
  unsure (1)..(427): unsure at all n locations
gcgacgacactgggatcgacctcgacggtgatcccgctcttctacccgccgacaatgaccctgttgacgattcggccgtaaccctcacgaccaaggagatcctcaagcggtgtctgcccaatgatgtggaggagatggcggctaggggnnnnnnnnnnnnnnnnnnnnnnnnnnnnnnnnnnnnnnnnnnnnnnnnnnnnnncgagaaggttgaccgggtctgctactgggagcacacgaaatttgcacagcgcctcctcgacctggacgccacaatcgcgccggactacaggttcatcaacttctcgccgccggaggaggtatcggacatgaaaccagtgactgtgcgatgggacgcggaggacgaccaacaacctcccgggtacctgtcgagcgacggaaacgaggaaaaggacgaggatgcccc

SEQ ID NO: 194639 - DNA, 164 bp, Arabidopsis thaliana landsberg
agtttttagaagaaattgtgatttctgtctataatgttggtgaagaacttgaaaacgtcaatgtgaatcttttggaaatagtgacacgtaaggaaacaattatcacgtttagaactcttcacaacttttggatgcatgtcgagaagacaacaccaaaagtttga

SEQ ID NO: 194640 - DNA, 314 bp, Arabidopsis thaliana landsberg
atgaacgagacgtcgggaaggaagtttaaagatgaacaactttgtactcctctggtagttactaagaaaagctgtggcggagcggaggaagttggctgcttgtcgttaaaattctttctaaggatacggagcaagcaatgagttgtgcaaacttcttatcacgtaatggtggtggtttaacagggactatttcttccttgtcgagcttctttggcgataaggtcggttcatgcttttggattggacgtgtcggagcagaattggccctagtaacacttcggatccaaagtcgtgtgataaggccttcaacttga

SEQ ID NO: 194641 - DNA, 212 bp, Arabidopsis thaliana landsberg
aagtttatctgtttgacatatcaaagagcgttaattctattgaagctaaagatttcagtttccttcacgcattaccaatgtctttgatgtcatggaatccgtttgatcatcatggaaggtggctcgcaacaacttgtgaatttatgttgaagaaaagacagaaatatgtggaacttgatgggggtaataatcgagtagcagacaaactatag

SEQ ID NO: 194642 - DNA, 164 bp, Arabidopsis thaliana landsberg
gtattctatgcagtgagataacaatggagataaggagacattttggagcaaaagctaaggaaaaggaagctacgggcgattttggttcaggaatcagcgaggagtgtcgactgacacactcttggtgtcgatcgacaccagtttcggcccagcaaaaaccctag

SEQ ID NO: 194643 - DNA, 204 bp, Arabidopsis thaliana landsberg
gcaaatgctgacgtattcgcatgggaaccatcacagatgcctgggatccccagggaggtgatcgagcaccatctgaagatccaccctaacgccaaaccgatgagtcagaagcctcggaaacagtccgttgagcggcaggacttcatccgcaaggaggttcggaagctgctagacactggcttcatcgaagaggtccatcaccca

SEQ ID NO: 194644 - DNA, 80 bp, Arabidopsis thaliana landsberg
tccataaccgaaccgaaaaacccgagaaccgaaccgacctgaaccgaatttttgttcggttcaattcgggaaaattttaa

SEQ ID NO: 194645 - DNA, 169 bp, Arabidopsis thaliana landsberg
atgggcaatgacgccagtctccggttcccgtaccccccagcaagctgtataagcgctcgagagcaggtcaggtccgctcttgagggggtctcacctgaacctacatgggtacttaaggaattctgttcaatgtcgtcggttgtccggcattcagtttgatgttgacatg

SEQ ID NO: 194646 - DNA, 233 bp, Arabidopsis thaliana landsberg
ctttcgagttcttctgctcgggtacatggaagcctgtggaatacatgaggatcgaagatggaatgatgacaatacgtctgttagagaatggttatgtgttggaagatatccgtcctttccaaaggcttggtctcagatcaagaaaagcggctttgagcgactgtatctgtttccttcggcctgatatcgatgtttgtgttctctatcgtatccacgaggatgacttggaaccg

SEQ ID NO: 194647 - DNA, 296 bp, Arabidopsis thaliana landsberg
atagaagccttcaaaaagctaacagaaaagatctgaagcaagtacaaggagtgaagcctaacctctcgagaaccttcatcgagaacaagcacgacgaaagaaggaggaagctatcaaacacagaaaccaacaccaaggaggagaaccaactgccaacaaagaagactaccacaacagaaacagaacgaaacctccggaaagaaaagagatgcaattcttctgtagaaactatatacgtcattctttttcattcttttattcttacgtggataactaaaaatctaaaatccgtatgg

SEQ ID NO: 194648 - DNA, 387 bp, Arabidopsis thaliana landsberg
atggcttcctcttcttcttcgcctcgcacctggagatatcgcgttttcacgagtttccatggacctgacgtccgtaaaacctttctcagtcatttacgtaaacagtttatctgcaatgggactaccatgttcgatgatcaagcaatcgaaagaggccaaaccatttcccctgaactcacacgagggattagggaatcgaggatctcgatcgtagtgctctcgaagaactatgcttcatcgagctggtgtttggatgagctgttggagattttgaaatgcaaggaagatattgggcaaatagtgatgactgtcttctacggagtagatccatctgatgtgcgcaaacaaaccggagatatcttaaagttttcaagaaaacttgttctg

SEQ ID NO: 194649 - DNA, 241 bp, Arabidopsis thaliana landsberg
gcaggagtccttcttggctgagcgcgacccacgccgtgaggccgtgcgcaccctgctgcaggtgctgcccggtcgcggggacggcgccagcctccgtgaggcactgcgggcccatccgctggaagggcccgccggtggtctgatgcgcgacctgtgcttcggtgtctgccgttatctgcggccgctcaatcaatggctcaacgagcaactgcaaaagccactggcgccgaaagcccaggcg

SEQ ID NO: 194650 - DNA, 1686 bp, Arabidopsis thaliana landsberg
atgttgttttcaatgactcaagatgctcatgaaaacttttacttcttccagatgatgtggcgtcttaacttatttgtggcgtttagctgcattattctcaataatgattatatgctgtactacatctgtccaatgcacactctgttcactcttatggtgtatggagcccttggtatcttcagtcgatataacgaaataccatcagtaatggctttgaagattgcttcatgctttctcgtggttatcgtgatgtgggagattcctggcgtttttgagattttctggagtcctttaacattcttactgggtcagtatcagactcttctcatatcttttactgtgttcggcatggtcgactgcgtatccgtcttgtgctaaaaaaatcctgccaatgtttgttgtcacttggtcactggaattagtgtttttgtatgttgactaacatttagtttttttccttacacaagtacaggatacactgatccagctaaaccagaactaccacttttacatgaatggcacttcagatcaggacttgaccgctacatatggatcattggaatgatatatgcctatttccatcccactgtaactcttgaacctacagccttctcgttttttcatatcttctcatgaaccctaccattaaaatattttttgacattttcatttcaggtagagagatggatggagaaattggaggagtgtgatgccaagagaaagatgtcaataaagacaagcataattgcaatttcctcatttgtgagtttgggttctctctggcttatggatcttatgtatttgatattattctgatgcccaagttgttccctatattgttcaggttggttacctatggtatgaatacatatacaagcttgacaaggttacatacaacaaatatcatccctacacatcgtggattccaataacgttagtatcaaatcccgttttctttcaccccaaacattaaactttgagatgtcttactctctaaattctgactttagctttgattattttgtcttagcgtctacatctgtctgcgaaattccacacaacagctgcgtaatttctccatgacactatttgcgtatgtttctcaatcttagtctcattctaaccaagcttagtgttttattctgtacacaactctaatatgacatgactgtcatatcttcgtaggtggctcggcaagattactctggaaacctatatttctcagtttcacatctggttaaggtcagcgagaaactgtttcctttctcccaattatgtaggcaagagaccatttgtctgaaggatctaggaatgaaattttaactgcaaattatgtgttctgcagatcgaatgtgccaaatggacagcctaagtggctattatgcattattccagaatacccaatgctcaacttcatgctcgtcacggccatctatgtcttggtaaagcaattgtagaatccatgaagaaatcctgtattcacgatacgttctattattgtaatatgttcttttgatttattttcttcaggtgtcccaccgacttttcgagcttacaaacacgttaaagtctgttttcataccaacaaaagacgacaagaggctgctccacaatgttctcgctggagctgccatctcgttctgtttatatttaacatctctcattcttctccagatcccacactaa

SEQ ID NO: 194651 - DNA, 190 bp, Arabidopsis thaliana landsberg
aaccaacgctacatgctggtgaagcagcaggaaccaaattctgtttatgaaaagttcaggtaaactagttacagaatgtccaaaacaggtaatagaaccttcatattctagaaacttgcttcttctactcaaagccctctctctttccatacgtcacagactcacagtttcaagcagaccacaaaaataa

SEQ ID NO: 194652 - DNA, 416 bp, Arabidopsis thaliana landsberg
ggttgaagccttcgagaatgctcgttacgctgcggaggtaaagggaaccgcctaccgtagggttgaagccttcggggatgctcgttacgctgcggaggtcaagggaaccgcctaccgtagggttgaagccttcggggatgctcgttacgctgctgaggtcaagggaaccgcctaccgtagggttgaagccttcggggatgctcgttacgctgcggaggtcaagggaaccgcctaccgtagggttgaagccttcggggatgctcgttacgctgcggaggtcaagggaaccgcctaccgtagggttgaagccttcggggatgctcgttacgctgcggaggtcaagggaaccgcctaccgtagggttgaagccttcggggatgctcgttacgctgctcccgtaaacccaaccgcctacc

SEQ ID NO: 194653 - DNA, 103 bp, Arabidopsis thaliana landsberg
atgtcgcgcgacccgattcttcaaaccctgccccttggattcccttggcagacgttcgacccgttcctgttttgcgtccatcacgacgacgcatacccgtccg

SEQ ID NO: 194654 - DNA, 843 bp, Arabidopsis thaliana landsberg
cattaaaggcagatttggattttaaagctagactcaacaagagactaagaaaccgcgttgtggacagcgatgaatttgtcaagtttaataacaaccacgaagcggcagtaggatacaaaggtaaagccccaaagctgatatcaagttcaagcttgagaagctattccccaaagcctttccttgctagacacttctctttcgggtccagaagtaatagtgttaaatccccaaaagagattcattccgcgagctctcttagaaagaaaggcttcttttggaccaaatctagcaaaatttgaaactgtaagctcctctctctctcatgaatctgaactcaaaataacgagtcactctataattgttgaatcatgtttcagaatctggatgctgtgtctcttcttagttcgtaagctagggccgaagtcaacgtaacgttttacttatcaaaggtacacacttgtttgtgtatgtattacagaaaagtttctcactagtctcccattatttttttgtttgtgcattcccaattacacttgtaaatatataattataataatataaggtaaaagtgatctggctgtgcaccagtaggtgtgaattgggttaatcagatcgagggatttatatttatatgttttggtttatttgatgtgggatcgtattatacgatttttatatacttctacaaaccatttctaaacaaatgtttcagttcaaaaccaatctaaacagatttgtattatgatccaacgttaacttccatggttcgtttgtttagtgctttatgaaattagttaccaacacaaacttgcacttaccaatcagaatacgtcaagaatttaa

SEQ ID NO: 194655 - DNA, 480 bp, Arabidopsis thaliana landsberg
aggttcacaacagatgaaaattttatttgggtgttaacacagcctatattacttaatggtcgatactacgtgcaacttcggttatttgtagttgattgggtagggtatttcattttttggtttttagattttttaaaaacgtttgctgaatttaactgaaatcagaaatcggttccggtctgtttggctctcgggaaattcggtttatgggtctgataaccaaatataacaaaaaaaaaatcgataactacataacaattaaccaaaattagaaatcggtttggattggtttggttcccggctaattcggtttatggatctaaaaagaaaaaaaataaccaaacaaaattcagttttcctagcccaatttgttgaattgacttaactaaaagaaatcatttgatctcataggattatggtacgaaacccacgttttctatcattttcctacgaaaatatgtcgtagaggatgtccaatag

SEQ ID NO: 194656 - DNA, 99 bp, Arabidopsis thaliana landsberg
atgttatcggctgatgtattagattacatgcataagcgttattgttacgatcatgtgaagcaaaaacacggcgttcgaggatcaacagacccaccacac

SEQ ID NO: 194657 - DNA, 212 bp, Arabidopsis thaliana landsberg
cttacatctctctccagggtttactcgtcaattccgatgaagccagctcagcgcgatcaatcggcggcggattgagcagagaggaatcccttgcgtgggagctcttcacgccttaccaaagattcctgcttgtggcggtcattggtgtcgccgccgctcagtcgaagaagaatggtgtcattcgtcagctccagaaatcagttgatcttagg

SEQ ID NO: 194658 - DNA, 344 bp, Arabidopsis thaliana landsberg
cctggcaaagcttcgggcgtacctctctgataatccgaacgcgggctatgtgccaaaacctggaacgattcagaacggcaactggaacaaaatggttccggcgatactggtcagggacggcgttgtttacgatgtgcaggccagatacaacggcagtttttttaggcggtccgtggagcggcaatcgtacaagattgatttgccggactaccagaccattgacggtcaaaccagcattctgctgacggacaaagatttcatgacggtggtggggcacgcgcttttttgcgaggctggactttccacttccaaatcagaatggactgatctttacgtgaatagcg

SEQ ID NO: 194659 - DNA, 567 bp, Arabidopsis thaliana landsberg
aaatcatcccaaattgcacttgggccgaaacctacatcagatagagcccagttacaaaaaagaaaattttgacaagttgccggaaaaagagaaaagctcgccgcttgttgatagatgcgggcagaacgactggaaccttaaatccggcgggcttaagatccactgtttcgaggtagcaaccagagatcgggattctccgctgaaagagaccgattttcttcgtcaaatccacccctttgaagcaccaacccaccacaaatctctcggaaagttagtcgctcaaattaggcacatcgacgtaatcggatcctgaaaaatcaacccaacccactgggcagtaacccctctctcccaaccgagaaaattcttaagctatcacgattcaatccgacttgatagatgcaaaattgtggtggatctagaagctggtggctcaaatccaaaacctctaaacccgaaatccacaaccgccctctaagatcgaaaggatctgcagctaaccaccgtgcgaacaacgaaccctcctttatcccccaaattttcgccatgggcggagctcgagactga

SEQ ID NO: 194660 - DNA, 450 bp, Arabidopsis thaliana landsberg
atgaaccggtacatacgctttgatgtaacagcaaaggccccggccacgatgagtggcggtcaccaagctccggcgagcgattgcttcaacaccagaccgcaccgagtccggagatgtcgcgcgcgagcttcaccgatctgtcgtgacgcccctcaatgccgcggctcgagtactagagtgctcaatcgggacctactcgacgacgacgctcaggtctactcttcttctctctactatcggcgatttagtgctgtgcgctttttgtgaaccagacgaggctaggtcggaagcagggaaaggaaccgcggtggtctggccggaaagcacgccgagaccaaatcaacggcggagcggtgttgccagcggaggttgtccgcggcggtgcacggattggggcaaacagggaggagaaggacggcggcgcagcacactcagggaaaaagggaacgg

SEQ ID NO: 194661 - DNA, 1640 bp, Arabidopsis thaliana landsberg
tgcaagtatcatcctccgcaaagccaccggagaatttgaaccaatggcgttgagactgacgacgctaaaacgcgccgctgctgatttccggcgtatattagaatcccgatgcttcagttacgtcgctgcgatttctcctcccttagacagcgccattgatcgctctaccgcttcgccgccgcttgttttaccggagttttataattatcaggatcaatcggattctatcattgatgaaaataacttcagattcggtttcctgagtttctctttcggtggatccatggagctaatggctgtgcccaagaagaaggtaataattatatttcagcttttccattataccactgcaaatatgaaatttgagagttttagggtttgaaagtgttgctgcgtttggaatttgctcttttagctgattttttttaccctctagggttttagggaggtttactattttgtggtaaagattcgatcttgagatcatgagtggaagatcttgacttcaatagacaagaatcaaagatctgtttaaatgtaatctgttttgctttgcttaggctcgaatgatttggttaacagtagcttttatttcgtgaatcatacagatttctaaacacaagagagggataagaaatggaccaaaggcccttaaacctactcctgtgatcatccgttgcaggtatttacaaatcaccttctgttacgttttgatggttcttaattatttttcattggttaagttttgcattcaatctggctttgagagtcaaacaagtctttccaattcaatgttctgtttctttctaccattatcggtggaaactgtgagttaccaacatgaacagactttaatggaagagcttttgtgtttgttgctctgtcaaaaactgagactgcttcttgaaagttgaaacaacttgatatcatcattttttccatttttggtaccaccagcattatgatcatgataatgttgtgtgtttgcaggagttgtgggcgagtaaagctgccacatttctactgctgcagcggtgagcgggcaatacctgatgaacaaagcaattcaaacaactgatcaagacttactacatgaataggccttgctgaatttggatccgaaaagggtggaaaatcaaaatagagtaggtgtagacttagattcactctgttttggcacatcatttggttttctcctgcagaatcaaaatactgcttgctttattagtacacatacttaagaggtgataaacaactacgtttgttctacatcttctaccattttaaaaggttttgcagaagaagtaatttggaaatgtatgcattttaaaatgcagatttgatctcaagcaatagaactacagacaaaaaaatgagatggccccaaatttgtggtttttgattggtttaagcgtaaaagtccccataccgccaaattacacggtttcactgccacacagacactgaagcttacgaagaaggaacacgtgtcaatctctagtcggccaaaaaatagtcacctggaatctatgatttgcttccttccatcaatttcggcaacagcagaacaacacgccattccatctatcggacgccatgtggcagtcacagaagaatccaacggctgtggaaacagatga

SEQ ID NO: 194662 - DNA, 63 bp, Arabidopsis thaliana landsberg
atggctgcgctgatcgctgccctcgcctttgtggccgtcaacgcgcaggaggccacggaagcg

SEQ ID NO: 194663 - DNA, 102 bp, Arabidopsis thaliana landsberg
tcaaaataattatggacaagatatcagaaggctatgcctttcgagctagagtacacgaaaaaggaagccgcaagagctgcattaaaagagctaaatggaaag

SEQ ID NO: 194664 - DNA, 1523 bp, Arabidopsis thaliana landsberg
gctccaagcacaacaagaggagtatcgacaaggcatccgtgaaatgtttgcaaagtttttcccggtgaacgcaagtgacgaaccacctgagatgaagaaccaagagcatcacgagctccatcaagtcatcaccacgagagctgaagcaaacccaacaaaaaacccagatatctctcttgagaattctgtcgaacacttggtgggcactgaatttctagaagcttctcccaatccttgggtctcagagcttcaaccggcgatgcattctcgcagggaaagaagaacccatgttacacaagctcgcaggagaggatttatttttgttaatcagagccatcataaggttagaaaaaagacaacacgaaagagacgtctcatgatcgatccctcaacacaaatcaacaaacaatccattaagaaacttggtaaaagatctcgctctttctggcttgactcgacagtgccatttccacggttgttagtggctagaaaagaaagtcacagaaggtctttctctggttactatggatctgattcccaagaatctagtgatggtgttgtttctagaaggaaatcatgggaacgtaaacgataccgagaaagcaaggatggtgacattaggtcaagtgaacaaagtgccataaatgggttattgttttggaccaactcgaagaaagcatgggagcaagtcggattagattctcaggaaaagaatgataatgctgctgatagtataagagtattatacattggatttcaaggaacagctcctcaagtcgctatggaggtggaacatgatattattagcaaagacgctgcttggaagggtcagaaaaaacagtcacaagtagctatggttggaagggaaagactggctccattagtgaaggattcacattgtgaagaggaacatagggaagctagagtgtcaaggcccttagatgaaaatctaagaagatgttttagcaactttgagaactattttggtgagaataacatcccggagcaggagaggttacaaattgtttattctaacttggaaggagacattggtcaatggataaagcatctctggaaaaagaattcacctacaagctggaaggaatttaagtgtatgatggcccgagagacaaagacaacaatgaaggtaaatcatcaacctcattattccggaatccaacaagaaggatcagttcgggagtatagagaaaggttcgaagctctttgtctaggctcagttattttaccaggacaaggcttggaggcattgttcttacaagggttgcagcctagtttgcaaactgcagttcgagaattgaaaccgaatggcattgtacagatgatggatacagctcaatggctagaagaaagtaacagtcttatggtctatggaagtgggttgtcagtacaaacagaaccaaaagcctacccaactacacaagcggagttaaggagcatggtgttaatgggatacatgagggaggatcttaaggacacaccaaggcctgcgaatgatgatacag

SEQ ID NO: 194665 - DNA, 329 bp, Arabidopsis thaliana landsberg
cggtctcccaggggcccaattcccgggtaagggattttccaggctggctccaaggagccgctgagtgctctcgccgagggagacatgaaggctagctggttctttgagattcacgaggatacccccgagcaggagatgaccaacctccctccagcacagcacctgcgttctcgatatttcgtctgacgaggagagtgagcgcaagcgcagcagggaccgcgccgagggccgcgacaaggaaaacattccccccgccgatgacgtatctcagacctcatcccgccggtctgcgcgagtcagcgccgacgacatggttgtcgagaaggaac

SEQ ID NO: 194666 - DNA, 293 bp, Arabidopsis thaliana landsberg
gtatttgggtccgcttgctttcgctaccccctgaccctcgtagcctcagcatagatcaagtcgtcaggaaacataaagacggagtttcggcagttcgctctggaattgatgagttgaaagacgctggttatttagaggtgcaccagatcgacaatgctcttgggcagtatgatggggtcctgtggtgccttcgagacacggccagagtagctgagacggctcataatagtcaagaaatcccggatgcggaaaatccgaaactggatagcccgccatcggattatcggggccgg

SEQ ID NO: 194667 - DNA, 423 bp, Arabidopsis thaliana landsberg
aatgcacaagcttccgatgatcttcttcgatgatcttcttcttcatcgcttatcgatcttaaccagttacctactgattctgagacatcttcagttgctatcttcttcatgcttcatcgccgctgattccaaatttccaagacgaaaacactacaaaaccctagttctgaaatttgttcttcttcactcgtactctttgattacaagatggctgggtccgagaagacacagacgaaagagccagtaaaccctaatttcccatgttctatgtctttgtgcctaacagagaacacaagccgcaagagacgtgatgtggaacagaggaagcgtacggttaaatcaagaaagcaaaggttgctcctttttcacaaacgccgagtggcttgtcaaggtgatgagagacatgaaaaaagcccaagataa

SEQ ID NO: 194668 - DNA, 47 bp, Arabidopsis thaliana landsberg
atgaagagcaggcttcggcgatatcgtagtcggtggttagatgattg

SEQ ID NO: 194669 - DNA, 682 bp, Arabidopsis thaliana landsberg
  unsure (1)..(682): unsure at all n locations
atggcaggcttggcggttttgcataagcttcatgctttggatttaagtgacaacacattttctggatcattaggaagagaaggtatgtatcatgaaaattaatttaactattattgatacagntattaacctttgaacccaaaaaacaaaaaaatgagagtttatattcacgtgtttgacaaaatatatggatacgagtttatttttagtatatacatgacagttcatcaaaatatccgtgaacaaaagatgatatacagccaaacattttgtaaaccgggcatttttctaaaaaaaaataggttctttagcattttaggaattatatatatagtagtttgcatataagtattttttaaattattaatttgtcaaataatttttaaaagaaaaaaaacattctaatcttaatgtgcctttgcttgtcattgttataggactttgtcaattgaaaaatttgcaagagcttgatttgagtcaaaacgaatttaccggtccatttcctcagtgttttagtagcttaacccaactccaagttcttgatatgtcttcaaaccaattcaatgggacgcttccatctgttatcagcaatcttgattctcttgagtatttatctctctcagataataagtttgagggtttcttctctttcgatttgatcgccaacctttctaagctcaag

SEQ ID NO: 194670 - DNA, 191 bp, Arabidopsis thaliana landsberg
atgaaaggcaaccaagcttcttctgaaccgtttatcccagtccaagtaaccttctccggcacattcagaaaatcgaagttcaacggctttggcggtggctcattaacctttacagtggattttgtctgccgcctagcgcttcctctaccttcagaatgctacaaaaatgtgcaaaaacaacaacagttcag

SEQ ID NO: 194671 - DNA, 305 bp, Arabidopsis thaliana landsberg
atgacggaaacctcgaacaaacaagtagatgagttcagtacgccttgtgccgcaccaccagctcggccaacgacgccacctcctgtcgtcgctcttgacacagttcccgccgagctcgaagaaacgacaccacgaggaaccagtctcgacgaagtcattcgatctttcctcaatcgactcgacctacatgatgtaagaactgccgaacacatcaacgcaatcgtcgctgcccaggaggcctcccagaatcagatcaagtaactatagtcctctacagcacgagtcgttcggcagctcatcgataa

SEQ ID NO: 194672 - DNA, 4141 bp, Arabidopsis thaliana landsberg
atggaattgatttcttcttcaacaattggaaactcagctctgtgtttaaccctaatctccattctcatcttcttcttcctcactacaaccaccattcccactttcccggatcatcctcttcgttctcttctcgatgactcccaaatcactacgaacagtagctcaatcgttaatcccaaatcctcttgtgtctcctctagatcccacgataatggcggcgtcatcaactatttctccctccattactgtatcttcaacgaaaacctattcttctcgatcccaatattgtctcttctcattcttcttcacttttacatactcattaaaaccgctcagactcatttctccaccgtcactacaaagctcgccgatcgtctcaatctctctccaagcatggctgctgtgactcttttagccttaggtaatggcgcacctgatgtctttgcctctgttgccgccttgcgtggtggtcagtatcgaaccggattcggagctatcttatccgctggaactttcgtctctgcctttgtagttgggttcgttgcgatctatgcagcgccgtttccggtggatgctgcgtcatttgtcagagatgtgcttttttatttgattgctgctttgttcttgttctatgtgtacttgagtggtgagatatttgtgtggcaagctatagggttcgttgggttttatatattcttcgttggtttcgtcttctggatggattttggtaccaatgttgagaaagggaaaagtatcagtgaggaagagaaggatttgttgagacttcaggattgtgagattgccgcaggttctcttgggagttataaagcagagaaagaacatcaattttcaggaatttttcggctttatggaacggtaaattcttcttcactcatctttgagctttgtttatcgatcataatgctggaattttatggtagtatcatattcagctaccaattgtgaactccgatattgtttagtttagattatgcgtttaaaggttttaatttgcttcctgttttcttcttagtgtactctaaggttatgataagtctctgtgttagtctagtgaatgagcattttcacttgcttaggcgttttcaactggattgtagctgtgttgacagctcaggagcaatcgttagatcggttagctagagagctaacatgttagaaagaagttgggcaaaatgagtttgagagaatttcgtagggtttaggattgggaactggtcaagactcgttaatcaagtctctctatgatatgtattcctttggtgaattcgactctaaaggagtttacctgtttggatcttatccaggttactatattttttctgttagactgcatttaagtttgaaataagtttagtgaaggttgtctgattctgcttttgctgctgtgattgcagatctcgaggatgtgggaaactcctgtatcagttcttttgaaccttaccatcccaaaaccttctccttcggaatggtctaggttttatcgctctgccaacattgttttctgcccttttgcccttttatacacttgcaactcttttgtacaactaaaccacccaatttcattcctctttccaaacacccatctcccgctttggcttgttgtcctcttcatgacgtcttccctagcgttcctccacttcacagtagaaaaacaaccaccaaaaaccgagcaactgccggtcattgttgtagctttcataatgagtgttttctggatatcaacaattgctggtgagctccttaactgcttggctgcgcttggaaccctccttaaactgcctccggcgctccttggcctaaccgttcttgcttggggaaactcggttggtgacctagttgctgacgtggcagttgcaaaggcaggtagaccagcaatggctatggccggttgttttgcaggtccaatgtttaacatgcttgttggacttggatcggccttggtgatgcaaacagctaatgtatatccagacgcttacaaacttggattccatgtaggtattgtgatagctttcgtcttcttgttgcttagtctaatgggatctctgttggtaataacctggtctagattccgagttccgagattctgggggatctgtcttgttggactgtatgttgctttcacatttgttagtttgatcatcgccagcgtttcaacctgatcatatgcgtgaagtctgcacattgaataatctagggtcaaccagggttcattgtttaggaatttttgttgtctagaagggaattgccaaaattttgagctcagctgatggccaccgccagaccagtaatcttcgaatcccacaaaaagttcttgtgatcgtccgagccagattagtaaagtttggtagataggtgatggtaaaatatatgtgctttgggagaagattttgactcccccatctggtttacttttccattgattgtactggtcttgtttttttgggtctgttatatatgtataaaccacacatttgtattcttttgatattaatgagaaatacttcattgatcctagaatgtgtattagagcagaacaaaatgttgattctggttcatttctatgtgatttgattctctgtgaatgccaaatatgttgtgatacaacaaaactacttgtgaaatttgaacctccaaagaagataattaaaggttgccaattaaatcctaagaagataataaaaatgaattaattaatgtaagagataaaacaaatcatgatctgacaagagcagaagaatcttgacataagcccaatggttgacacgacacccagcttttaaagctctttccacttacttccccttgtctttctaaattcctcctcattgttaaagtcgaaaaaagggtaaagcagcaaaaccctaataaaatcacaacaaattaacacaaaaaaccagatcttaaaactctctctacccaccaagaggatcaaccagtctcttccccttcagattctcctttccacaggtcactctcgtttgcagattctttttttcaatttgacttgttcttacttatatattgtggaattcacatgataaaataatatgtttggtgttgtaggaacaattctagttgttctgtgttagcagattctttgttctgtctattttgaaggaaattaaaggcaatccctttcgatattttcctgttttccttatcaaatttatgggttggaataagtaggttgatgtattgtcttttaattcgaagctcaattttcatacttattgctgtttagatcttcaaggttaatctagaattacagattagaccatatataaagtaaattcagcagattcttatttatgtaaattgtttgttagcaaccttatctccttcacatttctttaaaattctggtcagatgtttcttaagagcttagaatgaatcccaaagttctgtttttttattctggtagtgaatggatcaacaagaccatggacagtctggagctatgaactatggcacaaacccatccaaaccaaaccgatgagcaccactgctgctactgtagcaggaggtgcggcacaacccaggccagctggcgttccaccagatccatcagcagcagcagcagcaacagctggcacagcagcttcaagcattttgggagaaccaattcaaagagattgagaagactaccgatttcaagaaccacagccttccccttgcgagaatcaagaaaatcatgaaagcggatgaagatgtccgtatgatctcggctgaggcgcctgtcgtgtttgcaagggcctgtgagatgttcatcctggagctgacactcaggtcgtggaaccacactgaggagaataagaggcggacgttgcagaagaacgatattgctgctgctgtgactagaaccgatatttttgatttccttgtggatattgttccccgggaggatctccgagatgaagtcttgggaagtattccgaggggcactgtcccggaagctgctgctgctggttacccgtatggatacttgcctgcaggaactgctccaataggaaatccgggaatggttatgggtaatcccggtggtgcgtatccacctaatccttatatgggtcaaccaatgtggcaacaacaggcacctgaccaacctgaccaggaaaattag

SEQ ID NO: 194673 - DNA, 81 bp, Arabidopsis thaliana landsberg
ggtaccttggagacgactgcgacatctcattcagtgtttgagcctcaacccaaagtcaacattgatgatgatcatatgaag

SEQ ID NO: 194674 - DNA, 137 bp, Arabidopsis thaliana landsberg
atggcgtatattcgattatttccccaatctccgtcaatgccaaacgagcctagagtctttgtgtacacgacacgcatagcagcaatgcgattcttccgctctctgaatgtatcttctcggaggaagatccgtggaag

SEQ ID NO: 194675 - DNA, 1188 bp, Arabidopsis thaliana landsberg
ttgcgctggatcaatcccgtgggaattttatagtatgtacaagcgaaggtactacaaatttagtgaagtcgacttattcgcagataagctaatgttccatatcaacgaggttggtccacgtcgccaagggacatacaaaaattcctgggagtttgaggattacggtgagtgttggtcggaccatcagaacctcaatgagtatgagggacagtggtgtaacacatgtatttacttttacctctcccaagaagtagcccttatttcataagtacatttcagttcagttcttctttttgttcttcacatttgcggcaaacttaagaatatatgatttttttaatgagattttatatatgaagttattatgtgtgaagttaccttacgatattaaggtaagtagtacttctccactatttttcacaattataaagagaacaagtcctcgaccgttacctggtctcaaacagttttatggaactgattttataattgcacccattctccccactaagctttatccctctcgaatatctatattttatagaaactttcatttcctttctccctttataacccgttctgcgcagtacaaacattagagattctccaaaccccgccgatccagattttcctcctcagtaatacatccatccaccttccgctgccatcgttgttgtaccaaatcgtggacacactgcaaaacaggttttagttcgcaactaaacaaacaaatatgattcctttacttattcctaaaattaatcattcatctaacttatcatcggcccttttagcagaaaatgaaattccaggttatatattccggaaccaataacaactgaaatatttttacaaaaacatagcaactagttaaagatcatacatattttatattaacaactgaaatttgaatacacaatttctcaaattggattagaacaacttgtcttgttatgatccaatcctttgtagcgtcagcacctgttctgctgcgtcattcctgtcttaggtttctacgtttaacatgtgaaacaacatgttacattagtttggttagtttttcaaaagcttagacaatgtacgagatttacaaaatatttatctaaccttatattcccctgttgatggttttcttgctaccttaggcctccctgatggtctccgagtatatggtggaagcatagaacg

SEQ ID NO: 194676 - DNA, 439 bp, Arabidopsis thaliana landsberg
tagtatacgagacacagcttctctcaggcattacgtcgaacaacttaagcgcatcccaaagtctacgagatctaacatacccatcaaccataatattgaacgaagcagaatcaagcttcgcgtgatccctgaaaacagattccgcatcagccaagagacggcatttagcgtacatgttaagaacgctattacatatgtatccattagaatcaagaccggatttcaagacacggcaatgaatctgtctaccacaagtgacgtcattactggaagcgcacgatccaagagcagagacgagagctcgttcagtatcggagctttcgccggagaaatcgaagtgggtccgactcggagcagagaagcatctcgcctgcagagaaatgacccaacagcgccgagaccggaaaaaacgaatcaatttgatcataagagatcatga

SEQ ID NO: 194677 - DNA, 57 bp, Arabidopsis thaliana landsberg
atgaagcaggacgattattggaggttgacccataggttgatggaccatggagatcag

SEQ ID NO: 194678 - DNA, 116 bp, Arabidopsis thaliana landsberg
atgactttgattgtgccggtgcgtgctaggccgcacccgaaccctcctcccgctgtcgtcagcatcccggtgtccagaaagaagctgaacaagggttccaagccccagatatctaa

SEQ ID NO: 194679 - DNA, 122 bp, Arabidopsis thaliana landsberg
catggccgatagatagtagggccttatcagtggccgtgcaagccagatctagtcatgtacagtcaacaccaccagaactactggagtcaggtcccgttcctccgaaagatggtgcccccagg

SEQ ID NO: 194680 - DNA, 205 bp, Arabidopsis thaliana landsberg
cattacttaatcaggtaattcgcaccaaattacttcctagaacaaatacaattactgtagaaattgcaaggcaaaatcgaaacggtaagagtttgatcgtaccgatagaaacccatcttctgcttcctttcccacagcaaatttccgtgagttactgagagaagtcaaaattttgcctctggatagtcgccaacagcaattataa

SEQ ID NO: 194681 - DNA, 138 bp, Arabidopsis thaliana landsberg
gttgcgtggtgtaacaccatcaagttctctcggctcttggagttttattttgttccaagcaatttggtagattggttggaaccacttatgtatttgcttcaaaattctcctaaactacaaattcttacgattgacact

SEQ ID NO: 194682 - DNA, 212 bp, Arabidopsis thaliana landsberg
gaaaggggtgagtttcttcgcataccaagttaaggagaagattgttgtagtttcttgtcatagacccaaccggcactccaaggacatcatacacattgtggaaaatgataaattcatagaattggatcatcatggtgcaaaacctacacatgaattatctcctaccacacgtctcctcatatatgttccaagtttgccccaaattcaacatg

SEQ ID NO: 194683 - DNA, 185 bp, Arabidopsis thaliana landsberg
aaaaagtgaagtcgctggattatgtgcttaccccgggacgatatgtaggcctgccggatgaagaagatgattttaattttgctgaacggtttacagcactcaaggctgagttggaagcacagttcaaggaggaggagaagctgaataaggatatagcgaataatctgaaaaaaataaagctataa

SEQ ID NO: 194684 - DNA, 366 bp, Arabidopsis thaliana landsberg
cagcgacaacgacctccgctccgggcggctaaacagcatcagcgatgacctcagggcagacgctactgcgacaaggccctcgcccgcgtcctcactcgaggggcaaggacaagcttatgaaagccaaagagccggaggttggtccgcgggtggcgctgacggtctcatcggcggagaagccttctccggctgccaccgccttagcaccgacgacggcagccacctgcccaccggtagatccccactcaagtcctcccggacgggcgagcaccgacctctgcgcggagcgtcgtgccggagcgagggcaggacaaccaagaacacgaacgccgccatagcggtgtgcgacgtcttgggtggtccccg

SEQ ID NO: 194685 - DNA, 168 bp, Arabidopsis thaliana landsberg
aacgcagcaagggcactagatcccaccatatcctcaaccaccaaacgacaccctccaccaaccaatcgaccgccacggccgtctctttttcacccagcgcccccaaacaacaataattatacacagatacacgaaatcaacaccatggcggaacgagctctcacccag

SEQ ID NO: 194686 - DNA, 523 bp, Arabidopsis thaliana landsberg
cagcgtgaaagaaaccagagttcttatcccctagagccagccaaagattacgacttctctgcttccaaaaagcctcttctctttggtaagcactcaggagccttgtgtttatggagtcaatttcctcttgaggtgagctgttgctggacatttcatcctcaagttgttcacgaagcgtggaaatctcaacctgactgttaagatgatgttgtttactccacaatatgatggaagaacgacaagcagaaattctgtgatcaacagttgcagacaggtttgagttccatgaatccaagactaatttcttgacctcatcattatccttcagcctcctatcatatctaaagatacattttcttttcttagttttcgggtcaaaggatgtgacaaggggacgatgatccgatccttcaaagtgaagatattcactgcgacccgacgggtaagccatgatccagtcactgtttgccataagccatgcgtgtgccttttgcccctccaggatagaaatttgcccgtgtga

SEQ ID NO: 194687 - DNA, 492 bp, Arabidopsis thaliana landsberg
atgacggcaacaacaatgggtaagaaatgattacagtaaacagttcaccctcaaaaagttttgcctcccaatagttctgagtacacaagctatcagattaattgattatgtggtcatcgatgtgcagtgccgaagagatatgtctggatttacgctacaactcagttcggtcttgttgtttttttctctcacactttcttcacattggtgagagtttttttatctgttaagaacagaacaagacactctgtttcgtattctaactctcagtctatgtcggttatacttgtgcaggttcgcatgcagccggttgtggccattctcttagccactatcgttgggtttggactcaccatgagcggtacaacaggtatagtcgagttttcgaaatggaggagaagcaataggacagctgaacttccaagcagtagtcaagtggatcaaccactggttgagacaacagatcagaacatttctggatcaagaaactga

SEQ ID NO: 194688 - DNA, 193 bp, Arabidopsis thaliana landsberg
gcaatttattcaaagccgacaagttattgacaaatcctatgtcaggacaaaagacatgaataccaccatgcataccacaaggaaatcattctgtctgcacagacgatcaagacatgaaaatgaaaactatccaatactgacggaaatggcgctaacatttaacccaacacctctttttcaaagaattaagtaa

SEQ ID NO: 194689 - DNA, 150 bp, Arabidopsis thaliana landsberg
ccatcggtagaataccaggccacctacgaccggtgcttccacaccggatacctggtccaaaggttcggctccaaccattcacccaccgcagcagactacttctctcaccgccgacaggccgtcttcaactgcccttcctatcaccattga

SEQ ID NO: 194690 - DNA, 205 bp, Arabidopsis thaliana landsberg
atgattagcgagaaagagataaacttggtcgagcttatcaggagagagacaacaacaacaacaacaacaacaacaacaacaacaacaacaacaacagagagaattttccgggaaaaagaaaaaaaaaagatttgggagagaaaaagggagaaaaataatgaatataaaagagatattggggaaagaaagaagaagcttgaagaga

SEQ ID NO: 194691 - DNA, 420 bp, Arabidopsis thaliana landsberg
atacccatggttagtgttaaccatgaattttttgtttaccttactggattaggcatttcgatccaacactcacggatcagggccgcaccagaattcgaagcagttaaaggccggtttaagagctacttgggccggccatggaagaagtactcacggacagtgtttctcaaaacagatatcgacgagttgattgacccgagagggtggagagaatggagtggcagttatgctttgtcgacgttgtattacggcgagtttatgaacaccggagctggagcagggactggtagaagggtgaactggccgggatttcacgtcctacgcggtgaggaagaggcttctccgtttaccgtcagccgattcatacaaggagattcttggatccctatcaccggtgtgccgttttcagctggggtttga

SEQ ID NO: 194692 - DNA, 522 bp, Arabidopsis thaliana landsberg
atgtgtatgggttgtgggtattttgccaatgatagtaatgagcagctggaaaactttttgggattcctcttcgtggaacacactctcatgcttatgttagctcattcatggtcagttcacttcagccaaaagtttcaatttttatgtggaggttacatacttgagttagctagtagagacgataacacaaagtttcgtgaaaataagatattcttgtcaatgcctttgttgctataactttattagccatggttctgatgcacacttaatatcctcgctcataacaatatcacaaaagcattttcgatataattagttaactttggattgcagagtactgatgagattgttgacaaagtacttcgtagtgctgatgggaaaaccacgtgcgaggattttgttagtcatgttcagacatggttaaaaaagattcaggtttgtttattgcacattttgctcttcctcttcctgttttctagtctcaggaccattgttctatttctgcttcaaccctttgcttga

SEQ ID NO: 194693 - DNA, 158 bp, Arabidopsis thaliana landsberg
tgggctctttgggctccatccgtgccatttagctggtgtccctgtttggccttcggttcgcgtcctggcttttccttttgcgaccactagtgtgcgggatcgggtctgctctctgtttcttagcttcttgggctccgttcttttccgtgggctcgttc

SEQ ID NO: 194694 - DNA, 35 bp, Arabidopsis thaliana landsberg
atgaagaataaaaatcggattgtgactcgtaactc

SEQ ID NO: 194695 - DNA, 54 bp, Arabidopsis thaliana landsberg
atgggattcaaagtgcgattcttcattgcaagaaatcgtttcatggctcgagag

SEQ ID NO: 194696 - DNA, 330 bp, Arabidopsis thaliana landsberg
  unsure (1)..(330): unsure at all n locations
atgggccgcatggtctgtcgatcggacgagcaatcggccccgtcatcggcgtggccaccgnatcggtgcgctaagccgggcttgatcgctggaacgtcgctcgtgtcgtggttcagccgcgccacggcgtgcccggacagggctcggggcggcctgtggccccttcgacgtctgaaccggccagagtctacatgtgtcgagtcacgggtagtaaccgtaaggcgcaagaagctgattgcgggtccctcgcggggcccccgccgcctgatctctagagggttcagtgtgagcatccgtcgggaccaaagatggtactatgcctacgggtag

SEQ ID NO: 194697 - DNA, 69 bp, Arabidopsis thaliana landsberg
aataagaagttgccgcacactcaagctatagagcctaaaaaacccctaaaagccttgcatgaaggttga

SEQ ID NO: 194698 - DNA, 273 bp, Arabidopsis thaliana landsberg
acagagactttcttagatcatcaaacgaagaatcgaaagcaacccaacaaaacttatcaatcgattggggaaatgatcaaagacccaatcggaagaagagaagtaaaaggaaagacgatttcttttttctcttttctgggttttgcgtgtatctggaagtttcggatacttcatttcgaagaaacttcaaagaagaagtgcccgaccccacgtatagccccaaaacgacgacgagccatgtgtagagagtgtagtggtcgtgtggagttataa

SEQ ID NO: 194699 - DNA, 295 bp, Arabidopsis thaliana landsberg
ttaaaggagaaggggttgaaaaaggtgcagaagatgagaagaagactgcttcagcgactgggggaaatgagggtggtcagaagaaacgttgcatgatggctgtaatgagggccatccataagaccccacccctcggtcgcgacagaaaaaaatgatgcccccgccgatgccgaagctgatgaaatggccactgaagctgaaaatagtggatgccctcttggaaccacaatgttggagattgataggattatagctgatgtggttcccgagaggaaaatagatgaagtgactgctg

SEQ ID NO: 194700 - DNA, 54 bp, Arabidopsis thaliana landsberg
gacgcaaagttcgatgaagtgggagagagagcaagaggaaagggacttgtgcat

SEQ ID NO: 194701 - DNA, 205 bp, Arabidopsis thaliana landsberg
atgtttgaggagctgcatatgccaacggaggcaactatgttcaagatccatgatccggaagggaaaaggtcatgggatgttatgtataagttcagtaataaccagacaagattctgtgctggttggattcgtttggctaaagaacttggtttggagatcggagatgtttgcactttcacgctcatcaaacctaccgagatgcttg

SEQ ID NO: 194702 - DNA, 3583 bp, Arabidopsis thaliana landsberg
atggcagaaatttggcgcctttccgccatgaatagtcacgacgagattattttctctcttcagattgtgatttcaaatttcacttcgtttgtcacacgcgtgaagcaacaaaacacacgtgtgtgtatatttttattttattttttgctgggcggtcaggcgaagcagaggctcctgaagaaaatggcgcaacaaagtttatttatttcattaatattacttcttcttcttcttcgttggtaataataataagcaaatcccaaaaaccctaacggtactgtgtagaagctatatacattcctcttacttcacctcaacacgcaagaccagattcgtttccccgagagattcctttccttaagccctaaagtttcgatttttgatttttattttgaaagaatccaatttttggatgtctcctgcggcggtggagattgggtctccggttgaaaaagtctcttctgttctaaaccctatggaaaatttctctgcattttttccggagagtgttcactctcacgatcaacgaaccatgggctcttcgttctccttcggatttggagctggttcaggacaaaccacgaagactcgacacaagccgaggctcgtgaaattgaggaagaacggaagagaggtgaaaaaaccttctttttccggcgagatcctctcaggtttcaatccgtttgcgccgccgggtaaaggtatttttttttgttgcatttgtgccgaatttgatttcattgaagatccgggtttcgatattttgtgagctgattggtttagtttgtttctgtaggtagtcttcatatgaacagtgggaatgatagagatgctggccaatcacctggggataaatgttttgtctttggagctagtgggaacagttctggtgcaaaatctagtccaggcaatgccacaatagcttctttgtctgatgaagaggagtttagtacacctataggggactctgagttggattcggaatccattaaagaacattcaaatggagttaggggaaaggttgataatgatcgggaaaacatcagaccgtgtagtgagagcacaatttttgatgccacaaatggatttaggtttgatggtggtgttaacggaagctggaaaagtgttgagaatccagatgctgtcaaggagttttttcgaagacagaatggcatggacaaggcatcagcgagtaaatcttgtagcaagtctaacagtgtacaatatgctcatggtaaaaatagggatgatcctgaattgaacctgcatgctgacatggagaagcttaatatcagtgattccagagttcatggtggcagcgactatgaggaagcaagcaaatccaataagacacctgtatttacttttagtagctttggaaaggttgatcctatatgtaaagaaggtgcggcgacatcagagccatactcgttcagttccaatggttttcagcaaagtaataatgcgtcgggtgaaaaccccacttttcattcccagaccacctacggaaacaacttaacaaacactagctttgctacaaaaacattctttgatgatttcaaagtacctgaatgggatccttcgttgcttaaggacagtctgtttccagaagtagacagaaatccagtacatgcgcgaagtaatcgttcgtccaaggacaagagatcaaagaaagttaaggaaaaaatgaaacagggtgagccagatcgatgcaatggtcaaactgctgagggaattgaggctcaagaaaaactcaattcccctggatattgctcacccatggattattctccttatcaaggtgacaaaacgagcaatcaatttccaacagaaactcccctggcaccatcacattcaagagaacatattgattcccgctctagcaatgactttaaggttgcgtcagccagggattcatctctcttcacggcagaggatcatgggagtacttgtattccgaatttttctttctcagcgtccacctctcaggaaacaatacgacataaaaagcttcaagctgtaaagaaatataggaggaaagttaacaacagtttgccgaaaagcaatcttaatgccaccatgcgaaacaatcaagagaatcaacctgtgaatacaggtcaagccaaacaggactcgggctccacatcgatgatgcctgatgtctgtgaggtttggcgactaaggtatcatatactaactcaagagcttcaacattggccctttttgaatattttctttctcagaattgagagatgtaattgtttgtatcaggggaaatcaagcctacaaaaatggttatatgtctaaagctgaggaatgttacacacatggtattaattcttctccgtcaaaagataattcagaatactctgtgaagcctcttgcgctttgctatggtaaccgcgccgcagcacggatttctcttggaagattgagggaggctataagcgactgtgagatggctgcctcacttgatcctagctacattaaagcgtatatgagagctgcaaagtaagtttaaggcgtacctttcagagttgtttggttatgattcatatgaatcatatctgttgaataaaggaacataggttatgtccagaaattattgtttcacctcaagtcaatttgtctttttttttgcttaagctttatagcttgaatttagtaaatcccgtctgctaaggttttagatacgaattttcttgcagtggccaagaaagtctatatctaagaaataatgttcacactgtgtatctagtaaaatcaataattatgttatttattttttcttctatgtttgctttagttgtcatcttgtgctgggggaacttggatcagcagtgcagtattttaataaatgcatgaaatccacctctagtgtctgcttggatcgacgaactactatagaagcagctgaaggtttacaacaggctcaagtatgcattctcttctcagcttttttattgttctaccatggtctagtcaaaattgttttatactttatcagttaagatataattggatgttaattttgcgaacaatgtgctgaatcagcacatagttctgttattgtcttattgaacacatttttattttacttacctgcagagggtagctgactttaccagctgtgcatccatatttttggaaaagagaacacctgatggcgcatctgacgcattggttccaattgccaatgccttatcaattagttcatgctcagataaattgcttcaaatgaaggccgaggccctatttatggtgagtagcctttcgttttcacttctcaaaatttaaactttgctttcagtgggcatgatcttctatgtcaatcctgcagatccgacgatataaagaagttattgagctttgtgagaatacccttcagactgctgagaggaattttgtttcagcagggattggtgggacgacaaatgttaatggattagggtctacgtatcactcgctaatagtttggagatggaacaaaatttccaagtcgcacttctacttgggaaaccttgagaaggcccttgatatattagaaaagttacagcaagtggaatatacctgcaatgagtaa

SEQ ID NO: 194703 - DNA, 106 bp, Arabidopsis thaliana landsberg
atgaaggaaagattttcgaaactgctgcttggagaagatatgtcaggttctggaaatggtgtctgtacagctttagctatctcaaacgcaatcactaatctttgtg

SEQ ID NO: 194704 - DNA, 43 bp, Arabidopsis thaliana landsberg
ggccgcctcggcaaagctgatcgcttctgggtggcggatgttg

SEQ ID NO: 194705 - DNA, 111 bp, Arabidopsis thaliana landsberg
acggctcagcttaaagaatgtgaatcagttgctgctttgcaactttctggacttcgtcatgctgttctaataggagatgagcttcaactgcctgcaatggttcataacgag

SEQ ID NO: 194706 - DNA, 753 bp, Arabidopsis thaliana landsberg
  unsure (1)..(753): unsure at all n locations
tatgctcgtcatttttcttgcgtttgtggcttgtagacgaaccctccatcgataaagaaacgtgagatgatgagatttggagtgaattgagaattaaatttataaatggccaatgatgaaaaagtgggaggggaggagagggagtcacgccttcttacccgtatgtatctgtcatttagcattttaaaagcaaaccaaccaaatccttttgtgttgttttcgtgttttccttcttttacgttctcatttctctctctcccaaccacacaagcaaattataaaacgtattgagatatatatcaaggatgaggtggacattaagaaacaaatggctatttttagtttctttaatttcactcactgcccttcaaacactgatcttcacttatgataactaaatggaaatagaacacatattattctcagttaatatgacaattaagtatcttaaaagcaatttatgttgttctaaacccttgttaaaaaatattgagttgctccatatactataacaattgtgagcttcaatcatgaaaagagaatnnnnnnnnnnnnnnnnnnnnnttggaattcacataattttcatacattattttataataatctaatcgttttatgacctaaagatatagcttcacttctagtattggagcgtgtcttacgtctttacatgtcgagaacgtggaaaatgcacaaaaagaagatgcaaaacagcgcattggacatgtactccagagatctgacatgtgttga

SEQ ID NO: 194707 - DNA, 206 bp, Arabidopsis thaliana landsberg
atgatatcaaagaagctgagaggaaaaaaccgttcaaacatacacagtgtttccacaacttcacgttccattagtgagataatctctttgtcaatgactctctggcacaaatggttgaagaatgcacataagcggaatattgctgtcctaggaccttttggtaatagccctcttagtgcaataggaagaagctgctgcatcaacac

SEQ ID NO: 194708 - DNA, 387 bp, Arabidopsis thaliana landsberg
atgcccacgggtaccattacctcggcagtaacgggcagcattgtgggaaagaaccaggtgatgctttacctgggcactgtgcaggactcgagcctgatggaggatgaaggacaaatgcccgatcagcataccctgttcaagtgggacgaccagggtgatgcagccgcggtactgtacaaatcaggagaaaattacatctggatggtcaaccatgattctttggtctttgaaaaatcaccagcgattgaggtggagtaaatatccattactccagaaaaagctttatctttcaaaaaacaagaacccatgagcaaaacaaaaaaatccaccgaggtcgaccgttacattgccggttttcctccaaaaacgcaggaatacctggaacag

SEQ ID NO: 194709 - DNA, 296 bp, Arabidopsis thaliana landsberg
tcgttcgtcgtcttcagccgcaagtcccttggcaccgtccgatttcccacgtgtgccgtgcatggcgcgaacctcttctgtcctcgttggaccccgtatttgcaacgacgcgacttgactaaataattgtgcaacaaatgccttgggaattatactaacagtattgcttatagtgaacctcaatcacttccgtctgttgcgagtcgtcggccgaggtgcctttggaaaggttcgaatcgtcgaacgcaaggacaccaatctgtcctttgccctcaaatacatccgtaaagatgaag

SEQ ID NO: 194710 - DNA, 1006 bp, Arabidopsis thaliana landsberg
atggagtattgtcctggtggtgatcttcatgtcctaaggcagaaacagctcagcaggtgtttctccgaacccgcaactaggtaagatcacatttcacattgttgttatgaatttgtaatgctcacaaagtctttgtctggttagaaaattcagtggtaataatatacagtaaaattgatgatattgttgacaggttctatgtagcagaaatcctccttgcgctggagtacttacacatgcttggtgttatataccgagatttgaaaccagagaacattctagtccgagaagatggtcacatcatgcttacagattttgacctctcactcagatgtgtggtgaacccgactcttctcagatcaacttctccacccgagaaagatcccgcaaggatgtccggtccatacagcacatcgaattgcatacaacctctatgtattgaaccatcatgtcgggtcccatgtttcagccctaggctcttatcaacccaagcaagaaaccaaaaaccaagaaaaccgaaaaggcctgatcttttgacacagcagttcagatcattgcctcagcttgtggctgaaccaaccgaagcaagatcaaattcgtttgtgggaacgcacgagtacttggccccggagatcattaaaggagaaggacatggtgctgcagtagactggtggacatttggggtccttctctatgagcttttgtacgggaagacacctttcaaaggttatgacaatgaggagacactgtccaatgttgtataccagaacctcaagtttcctgatagcccgctcgtgagcttccaggcaaaggagttgatcagaaggctgctggtgaaggatccagagagtcgtctggggtcagaaaaaggagctgcagagatcaaaagacatcctttctttgaaggattgaattgggctctcatccgctgcgccataccacctgagctgccagatatctatgacaatggtgccacggaagcgacttctcctgaggggaataatag

SEQ ID NO: 194711 - DNA, 87 bp, Arabidopsis thaliana landsberg
gatccaaaaagttgtgcagaacaaaagatcatccgagaatatcatctttcatacactaaaacgattactttgaatccgaattcttga

SEQ ID NO: 194712 - DNA, 56 bp, Arabidopsis thaliana landsberg
atgcggctaacaattgtagatgctaatgaaagtcagcgtcaaacgcgttatatctg

SEQ ID NO: 194713 - DNA, 113 bp, Arabidopsis thaliana landsberg
atggttggccgtttcgtggctaaccgcactgcgatactcgcggctgtggagaagcaggggccgtacatctactcggttcagatcgatcggatatcgaggctgttcccgtctca

SEQ ID NO: 194714 - DNA, 166 bp, Arabidopsis thaliana landsberg
atcaaagactgctagatcaaagatgtcaaaaagctctgtttctgtttcggattcggataaagagaaagacgccttattcgttgttcgaaagggtgacattgttggaatttataaggatttgatcgattgtcaagctcaagttggatcttcggtgaattcatcttaa

SEQ ID NO: 194715 - DNA, 648 bp, Arabidopsis thaliana landsberg
cgcgcctgtcgtggaccggcgagtgcgcactcgcccacgttgccggatttctcgaccacgacgcccacccactcgcccagctctctttttagagccccaccagtgccccacacacacccctcacctcatttcgcgcagctctgccctctctcgcgctctgcccacaccgccagacgccgccggagacccatgcccgcgttcccgatcatctagctcaccggagaccgcgccaagcctccccgagctctgccccaaggtgagactcccgcccccgtgcttgttttaccttattcgcgtctgcgtttagccaatttggcctcgccggcgtgtggccgcgcctgctcgttgcgcccgcacggtgtccggccatcccaacctcatccagtgcccgagctttggcctagggtgttccctatcacagctgattaccacctcttgcggccgggattcctcactggagttactccggcccgctcgagacctcctccccgccgttctaccctctctgccctcagactcgtggcctcttccccgccattgagttcgccgtggcgttctctccctctctgcccaactccagcgacctcagaacctcccctactcacgcctgcctcaactccagcgacctcaccgccgcggagaggagca

SEQ ID NO: 194716 - DNA, 134 bp, Arabidopsis thaliana landsberg
aagaagagaggcggcaatgagtataacagattagagaagaagaagagatgcgctgacgaaatcagatcggagaagaagagatccggcgccgaagagatcagagaagaaaaagagaatcgaagaagaattttagg

SEQ ID NO: 194717 - DNA, 153 bp, Arabidopsis thaliana landsberg
ccgctctcgccgctgttcctggcctgacgctggccgccgacgctgcacccgctgccgctccggccgcagctgctccagcggcgacgagccttgaccagctgcttaaccaggtccgcacgatggatgtgcgcgatgcgcaggacaacgttgcgc

SEQ ID NO: 194718 - DNA, 257 bp, Arabidopsis thaliana landsberg
atgagactcaaaagacaaacgtttctgtttagcaatcggacagactggacaatgatcaacttgactaggtaaagtagtaataggtaaagtaccagaaagcagttttaacttgtcagaagatgggtgtcctaggcgttgatgccaaagatttccatcaaccttcaaggatccagagaaatgtgatgatggagtagccacagatggtaatgaagacgatggagatgatgtatgcggttgtaaaatgtatagattgtgca

SEQ ID NO: 194719 - DNA, 192 bp, Arabidopsis thaliana landsberg
atgatagttggtgcgccaggtaggggagccgttagcgtgccaagcgacatccttcactctgatggccagttcatcagcgttcaccctaggagccgcatcaagttcagcgccctcgactccttcgccatcgccacggggtcactctgccttgccaaccccaatgaacctgccaatgcggatacgatgcccagc

SEQ ID NO: 194720 - DNA, 272 bp, Arabidopsis thaliana landsberg
cttcagagtcttcattcagcataggaagtcgggttttaaacaagtatcggagttgtcttcttccttctacagttcaagctttgatatgtgcgaggaattggctatgcaactttgaagagattggtaagcttttgacttcttttcttttgtcatatttcaatcaatttgaatcttaatgcatattgagttcttcttttctgtagtacttaggtgataatattgaattccttaataaagacaaagatggcgagagagaagaagaagaagtttaa

SEQ ID NO: 194721 - DNA, 205 bp, Arabidopsis thaliana landsberg
gttagggaagctgtatgtaaaggcacaccttaagaagccttattctacaccttggcagcctaaatctagagtagcaagtggtcacaagaggtccaatagagaatctgagccgcggacagagcactacaataacaaggaaaaaatcacaataaaaaaggcgactataaaccacacaacacgaggaagttgtctcaacaagaaatga

SEQ ID NO: 194722 - DNA, 314 bp, Arabidopsis thaliana landsberg
gtctgcaaggtcccgtatcttcatctgatatctcatcctacatggaattctcggacatcgtcatggactgtcttcatgactgttcctccatcaatcatcccccaaggaaggtctgaaacccagtctcctgatggtaagaggaatcttaagacgcagttccggacaaaagtggtggtgaaggatgattgtattagtgttgaagcggaatgcacgcccaatgtggttggcttactcaaaagcagttcctgcaatctattctctataaacaaatacgagtgcgacgtggcagaccttcccgtgatgattctccacag

SEQ ID NO: 194723 - DNA, 87 bp, Arabidopsis thaliana landsberg
gccggcggacggctggtgatcgcgatcgacggcaaggccgtccagggcgcgaaggacaaggccgggaaggccccgcacctggtcgag

SEQ ID NO: 194724 - DNA, 368 bp, Arabidopsis thaliana landsberg
cgccgaacgccgtcagcggcagcagcggtgcgcaggccagcagaccggccgaaagacgggcgtgaatcccaggacgcatgaaccttttccggtgtccgcgcgatggcgaccgatgccggccaccatcgcgggtcgtcgagacgcgtcgcttacgcgccgaagctcaaggtcggcttgggcaacggttcgccgagcgcctgggtgagtgccgtccagtgcatggtttcgtcggcgatcaggcgtccggcgacctgcgcaaggctgcgatcggaaaagctcggcatcacgccgatgtaggcattgactgcaccgagttccaggcgttgcgccagcttgaggacatcgctcgcgctcttgatgccggcgac

SEQ ID NO: 194725 - DNA, 514 bp, Arabidopsis thaliana landsberg
atggggttcttgacttgcctccgcgacttcgattttcgatgtttcggtgcgtttcctcctgtagatataatctctgatgatgaagaagaagacgaggaagaggaagaggaggatgaagaagaagatgaagatgaaagttcagggacagttttctctaaatggcttatggttttacacgaaaagcaaaacaatgaagattgtgtcgacggaaaggaaaacgttttttcggatgtagaaactgcggttccgccgcctaacgcgttgttgctgatgcggtgtagatctgcaccggttaagaattggttagaggagaagaaagaagaaacagaggaaggtgataacagagtagaacagagcggagaagaagaagaagaagagaaggacagagtgggaaataagaaggatctgagatcattaatggaggaagagaagaagatgaatttggtagtgatgaattacaacacaaactattacaaactctctaatgatatcgcaaaggaaacttgggttgtcg

SEQ ID NO: 194726 - DNA, 37 bp, Arabidopsis thaliana landsberg
atggctccgaacatagaaaataccatctacgccttag

SEQ ID NO: 194727 - DNA, 72 bp, Arabidopsis thaliana landsberg
atgctgctcgccaacgagttggtcgatcccgtccgcatgcgggccatggaaaacagaggcgggcgggtcacg

SEQ ID NO: 194728 - DNA, 474 bp, Arabidopsis thaliana landsberg
  unsure (1)..(474): unsure at all n locations
atgtcggtcaatgccgagggcaaggtcacgcgttcgaggttttatcaggccgtgatgcgctcgcatgcacgcttgacctatcggcgcgtgtggcaggccatcggcgagcgtgatgacgatgcgcgcgcggaattggccgacgtgttgccgcaactggagcacctgcacgcgctgtacaaggtgctggccncggcgcgtggtgcgcgcggggcgatcgagttcgaatcgagcgaaaccaagtttgccttgtccgccaacggcgaagtgcaatcgctgggatccgcgccccgcaacgacgcgcatcggttgatcgaggaatgcatgatcgcggccaacgtgcaggcggccaagtttcttgatcgcaagcgcattccggcgttgttccgcgtgcatgcctcgccgccggtgaccaagtacgacgccttgctggagttcctgcgccagtaccgactgaccttgccgccggccgatgaa

SEQ ID NO: 194729 - DNA, 155 bp, Arabidopsis thaliana landsberg
gagattgaaagatggaaagaggtaaaaggagcaaaagcgaggcagctaagtagagagactagagagaagagagaggtaaatactgaaaaagtaaaagtaaagatcgttctgagagagaaaggacaaggaacaacccaacaagatgcactaaactg

SEQ ID NO: 194730 - DNA, 76 bp, Arabidopsis thaliana landsberg
atggagagcgaagatgctgatccggacaaagatggagttgatcctgtgaatgaggatgctgatgaagctcttgatg

SEQ ID NO: 194731 - DNA, 1146 bp, Arabidopsis thaliana landsberg
atttggtgataaagaagaaaaaaagatgtcctcttttgcaggcttaaaaaagtgtggtgcagcgtacgcaggtaaagaagaatcgaagccagttgttttggtagcagaaaacttggtagatgcagcagcatcctgtggtatggtcctctgcaaaaaacattttgaatcaattctcttttacagaagtatagatgagaagagaaactttgaaaaataataataagaaattaatggtacctcattagtcgaagcctgtctcataaaaaaaccttgtgcagaagatgcttgccgagcaaaatacagcctgttgtcaccccttctaacgacagtgttcttcaaattcatacctaagttctgaatcatcatcacaagtgacagaagaggttaatggtgtgggcatatttacattacagtacagatatgactttgttaactaagtgtagttagacagtaagtgaccagagaagaaggaggagggacttcaaaacataataaagaacttatggtacctcaaggacatcatcgggtgaagctggcctcataaaaaagccttgttcagatgatgcttgccgggcaaaagagattttgttgtcacacctttggatgacagtgttcaaattgctgctgcagttctgaggcataacacgaataagagatccattagaccaaaataaaggaatcagtgaaccaacctatttgaggcagagtcaagtataaaaaaacacatccataagcatgatatgactttcaataattgaacagtttgagctttccattgcaacacccttaaacgaaatcaaggtttaagtcaaaatgaatcagactaactgttcttgtacttggtcgatctgctccaattttgcaagtaaatccacatcgagattcgagatcggtcaagggatcagaaaaactatctaaccaagttaagaaaccataggagaacgaaatacagaaagtctaattcgaaaaccgtcggatccttggggtctaggcttccagataaggaaacgagagacaaaaagagaaggggaataccaaggggacgagagatgcggtggaggcggaatcgtaactggttgccgggaagtgagcggcgaaggcagcgagcctgcgtcgagcggtgatagattcatgctccatctctga

SEQ ID NO: 194732 - DNA, 480 bp, Arabidopsis thaliana landsberg
  unsure (1)..(480): unsure at all n locations
atgctgtacatgcagtcgcaggccaacagcgacggcaatctcaccatgaccatcagcttcaagctgggcacggacnccgacaaggcgcagcagctggtgcagaaccgcgtctcccaggcattgccgcggctgccgcaggaagtgcagcggctgggcgtgaccacggccaagagttcgcccaacctcaccctggtggtgcacctgctctcgcccgatggccgctatgacaccacatacctgcgcaattacgcagtgctcaacatcaaggaccgcctctcgcgcattcccggcgtcggcagcgtcgaggtatggggggcgggcgactacgccatgcgcatctggctcgatccgcgcaaggtggcgcagcgcgacctgaccgcatcggacgtcgtcaaggccatacgcgaacagaacgtccaggtggccgccggcaccatcggcgcgcagccgagcccggccagcgtgcacctgcagctctca

SEQ ID NO: 194733 - DNA, 88 bp, Arabidopsis thaliana landsberg
atgtaccttgttggatccatggaattagcaaggctaatggatcggggtacacgtgtccctttgttaagctcccatcccactgaattag

SEQ ID NO: 194734 - DNA, 103 bp, Arabidopsis thaliana landsberg
atggggcaacttgatcaacgggtaggcgcatacgccgacaaccacgaccaagacgaccaccatggcaatgatcagcccctttacaataaagcgtggagagggg

SEQ ID NO: 194735 - DNA, 345 bp, Arabidopsis thaliana landsberg
ggcaggagccccaaggtggataggaaaaccatttacagaattctagacaggcttcaggacaaagggctctgcaaatgtgttggtattcgtgttccaaatgtaaatgattgtgaccgtagtcgttgctctgtgatagttctgcatccatctgttcaaagattgactcgagacataggaaatgaaattcatgataggattaggtcttttgaattaggattccgtagccagagatcatcgaagagggaaagcgataagacagttccagtattgaatcacgttcagagagctatgcgagctagcaaatcaggagctatgcgaggcaaaggggttgtgcttgcaaacatg

SEQ ID NO: 194736 - DNA, 122 bp, Arabidopsis thaliana landsberg
atgaatgtagccttcttcttccttaccttctttttcatcatccctatcgcgtttgtacaatctcttgctaccattgaaggaattgagaaagttgcaccgttcttgaaagtcattatcgaaaa

SEQ ID NO: 194737 - DNA, 14 bp, Arabidopsis thaliana landsberg
gtaaaagggagtga

SEQ ID NO: 194738 - DNA, 175 bp, Arabidopsis thaliana landsberg
atgcgggggcgcatgaaacccagcaccgccggcccggcttctcctacgcgcacggcggcagaaaagcgaagctgcaaccaggtcagatacaatgccatcaacagcgcccccaaggcccaggtcgcaaaaagcagtagcgcgaaatcgggcgttccatacaccgatgtcggcggcg

SEQ ID NO: 194739 - DNA, 116 bp, Arabidopsis thaliana landsberg
ataaaatctttgtcaaagggttttctcacaacaatgaaacttgtaaacgtaaaacctatgtgataacaagtaatgaccatcgattagcgaatattcaagaacataaggatatataa

SEQ ID NO: 194740 - DNA, 617 bp, Arabidopsis thaliana landsberg
ttattatttacgcttttgttgtgtgttttccatattcttactctatccaaccgaaacccgaatccggatccaaatccagatccgaagccttcatatcgtcggcatcaacaggcgacgaattacctcaaactcaaagctaaattcacaggcggagaagttggattcgaaggaacgtctttcgtaaatcaattctgctctgtaactagtttctgtaagtgtttggatcaatattctttgttaagctcaaagttaatgaatttggaattggattttcaaaatcaccgttcgtaaaatgcttcagaaagatgtctgaattctctctttgttactcattgcttctgatcactgtcggttttgtgggtttaagtccgacaagtgtaggagcttttgcttctgagttatgtcggttttattatcttaactatatatgtgttgtgtttttttatacagaattgaaacttaacttacatacaatctctgtttttttgtttgcccttgtgggcagaaacaaacgatgcctcgtaaaggattatccaatttcgatgattatgatgatggttttgatgatgatgacgatgcttttgattgtgactatgatgttgatatagatgaacatg

SEQ ID NO: 194741 - DNA, 285 bp, Arabidopsis thaliana landsberg
atgggcgacggcaacagccgcatccagctcataggcgcggtcgaacaggcaagccatcgtgttgcagaaaacggcatcatccggccgcagtgcaagtgcgcgccgcatggttgtcactgctttcagggtcaatccgcgggcagcgtgtgccatggcctgcaggcgcaagtattccgcgtcgtcgggatgggttttgccaagccattcgagatgttgatccgcaagtggcaaatcattattgtcgagtgcgcttgctatcaagcggatacgcctgtcgtatctgtg

SEQ ID NO: 194742 - DNA, 146 bp, Arabidopsis thaliana landsberg
tgttaaacgacctgttcaaaaacattgatggttcgataagccgagggtcaatcgtccaccatgaaaacgaaggggcgtacgtttggaggacggatggaccaataagccaagagcttgattcggccatcgtgaaccaagggatttag

SEQ ID NO: 194743 - DNA, 84 bp, Arabidopsis thaliana landsberg
atgcaccagtcaggtgtgaagctcgatgctttcgccctgggtaggatcctgaaggcttgttctgagcttgaccattcagaggat

SEQ ID NO: 194744 - DNA, 196 bp, Arabidopsis thaliana landsberg
gcttccatgggcttgggtgccgcaccggatactctcgccggcaccggataattcatttgtttggggagcagcggctgtgtgacggtagtgtgccccggttgcagtcgtgggattgcgtcaacgcggctctggcgtttgacatcgtcggccggttcgccggcgtgaccgaccacaacagcgtcttcgcggtcgtgcg

SEQ ID NO: 194745 - DNA, 133 bp, Arabidopsis thaliana landsberg
atgaggactgcggagcggatctggctgcagaaaaggattaccaccgccgacacaaggtttgcgagatgcaggctaaggctagcaccgccgtggtcgggaacactgtccgggggttctgccggcaaggtagtag

SEQ ID NO: 194746 - DNA, 189 bp, Arabidopsis thaliana landsberg
gattctcagtcgcgtgcattcgcatgcgacggcctcgatggtgacgagccgtccgaactccgagagattccgagttccctggccgtagaagctctagtcatcatcttctaccagaatgtctacagaccacatagcgacgtgggaacttgcttcacatactatgaagttcccgatccctcccgagtctaa

SEQ ID NO: 194747 - DNA, 219 bp, Arabidopsis thaliana landsberg
gtgttgttatcgtttgttgcggtacacggccgttatgcgcagtatcagcaggagcgggtgcggattgcggtgtaattgtctgtgccagttattttgtatgtacatttttattccagatcagtcatcccgcagtagcaccgcctgctaccaggagaatgacagctgccgcacgccaccaccgggcaggagaatgctgcggtataggccgtatcctggcag

SEQ ID NO: 194748 - DNA, 121 bp, Arabidopsis thaliana landsberg
atgaaggctttggatccaccagaggatacaatggagtttcatcgttatccaattctccatcgaaaggaacgcatcacgagcatgataaagcatgatcacagttacggttattacggttacg

SEQ ID NO: 194749 - DNA, 84 bp, Arabidopsis thaliana landsberg
gacaatgccgatggtagtgaaactaatgaacgttataaagcacgctcagagtacttggttcgaggtttatcgaaaattgttgcg

SEQ ID NO: 194750 - DNA, 296 bp, Arabidopsis thaliana landsberg
ttttatggctatctctcttctttctcctcctccaccacttgtactccctcaacttccgtcggctctactctctaaacgcggtggagccatcattgttgaagcaacactaccgtagctatagattagtgagcagaaaagttctctccgacagattcgacttcacacctttccatagccgagataacagccgacataaccatcgttccggcgagcaatacgacggtgatgagatagaccctcgttacggagtggagaaacgccgtgttccctccggacccaatccgttgcaccattga

SEQ ID NO: 194751 - DNA, 39 bp, Arabidopsis thaliana landsberg
gctacgcgtaacattggcacatactactttttcatgtat

SEQ ID NO: 194752 - DNA, 164 bp, Arabidopsis thaliana landsberg
aaacagtttgccaaaggaaaatcctcaaagccacggtgttacggatcgcggaggggacagtggcagagaatgtaatttgttcgaagggaaatgggtatttgataacgtatcataccctctttataaagaagaagattgcaagttcatgtctgaccagttggctt

SEQ ID NO: 194753 - DNA, 208 bp, Arabidopsis thaliana landsberg
atgaatgagttggtggaatttcgatacaagattcaaaagattagatacggtttttggtggtctgacaacacggtggtggaacaactcaaaacagcctacgttagtgagaagtgcaagtgcgattgtaaaaccaggatgttattattagtaatgaatcgtggttggtatttattcggtgatgaaaccgacttggatttttcttctgctt

SEQ ID NO: 194754 - DNA, 110 bp, Arabidopsis thaliana landsberg
atgagctcgttcttggaaatggttcggattagccgccctgaggtccttggtttaagcccaagacctgaggcaaccatgatggtcccaggtggaaaacaagagcttatatt

SEQ ID NO: 194755 - DNA, 83 bp, Arabidopsis thaliana landsberg
cttctacaccatcagccattgtcaaagacatatctagatatcgtgaagaactgaatttaaaagtatggaaccaaagtgattga

SEQ ID NO: 194756 - DNA, 433 bp, Arabidopsis thaliana landsberg
cccgggtgaaccagcggacttggtgttccggttccctgacggggcggggaccggtagtggtggcgacgtagacgtggtcttcgtgaacgtgcggctcgccggtgtgccggtccgggacggcgcgcccttcggcgaacagtcacggcgcgggcaacaggcggtgggggaacccggccgggaccggggcagcaggcccgggaaccagggtgacatccaggccggtttcctcggcttccctattgaataggcgtgttgccgcaggtggcggtgagacggcagatggctatgtggcgggtgttctgggtgccgcaggatgcggtgcggacaggggtgcggcggcgggtcctggcgggctggaaagacctgcccgcgccagaggatcaaaccgggatcaaggcgaaacgaaaagatcttcctgtcgccggattaccgg

SEQ ID NO: 194757 - DNA, 451 bp, Arabidopsis thaliana landsberg
atggaggcccaggcccacgcgtcatgcaaccagcgcgccggttgctacgtgcgagcaactgcaccgccactcgcaccactaccatgcctcctcgactgcggaaccagtaccacgactcgaggcaaccctgcgtacgacccggcagtgccagccaggtgcgacggtcaatacgacaaaaaatgggccggcagtaatggcggtggcaggcgggcaggagcagcagtcacgtcgtcagccaagcttacgtcccatcctgggacagtgagagaacctctctcacggcgtgaagaaggagcactcgtgttccgttcctcgaacggctccggcacgcgcaacggccgccccgcgaaccactcgccccgtcgcattaactccgcggcgggacaggcggccctctggcaggggaggcgagcgaccgttcgccttcgccataacgaccgcatcaaaaaag

SEQ ID NO: 194758 - DNA, 455 bp, Arabidopsis thaliana landsberg
atgtcttcatcaggaaaagaccttttgtttttcttgaaaaaccaaaaccctttcaagatatctcatagcttgcaaaaacaggtctctgcaatttctgtagaaatggagaaactagatgtcattcacgaggtattgcaaaagaattatcacatcctattccatgttcttttttttttctttttttcttcagctgttttgaattatatttatacatattttgttctaatcagagtgaaaaagttgcacaactgatgctagagtcaagcacaagccatgcgattgtatgtgataagctaaggaaggtttatcctggtagggatgggaacccgcctaaaaaggcagttcgagtgttatccctcgctgtgccttcaggagaatgctttggcatgttaggtcccaatggtgctggcaagacttcttttatcaatatggtcagtacacaaatcgacccctaa

SEQ ID NO: 194759 - DNA, 84 bp, Arabidopsis thaliana landsberg
gtgtggttggtgcaaggtgattcttcacggcgacgacaacgccaacagcgaactgagaggtgttgcggctctgcacaacccttg

SEQ ID NO: 194760 - DNA, 180 bp, Arabidopsis thaliana landsberg
gggtatatcatcggctattttgtccactttttcctggcggatctttaccatgagctggggatttttcgggtaatactttacatttccggtgatattctgcttttccaggccaccaatacgatgttccaacccggctgtgccggggatagcccaggggcgcaccaggttttcatcacgctg

SEQ ID NO: 194761 - DNA, 1236 bp, Arabidopsis thaliana landsberg
gagactccaaaaagtagtggaatgtaagtgtagtgatcatcacctttcttgcaaaaccatacacgactggcaggtgcgtcaaagaaccaaataacaatgtagtcttgtgttttcttctctacccacaaaagatgatgcagacataaaccttacttcacaaaccgctgaactacaacctgtaccacatcatgttctacatcctgtagcagaagtcctggagggtaccatgacacgttcaaaggctaaacaactgaagaaaatgttcaacttagttgtgcaagatattttgagctccctacagctatgagtaaactggtccgtagcaccccataccagatatgatctaatacccgaagaagagcttgctgaagcattcacccaaatgagtcttgaacgaactactcccccaggtatgaaatatcgtttgacaggttcaaggacccctagaaaccaagagaagactttggagctttaagagacggacgattagagtgtcacagttgaaagtgattgagagagtcaagatcaagaacaagacatcaaggacatagaacagctcgaagacattgataaagctactcaggaggaaccccagaaagacctctacttcaaggaacaagccagaaaacaagcacaagacttgatgccagaagtacctcaagaagtactacaagaagtgactcagacgacagctattgggcctaaaacgcattttggtaaggtttatttagtttatactatctttgcagatccacacagcccagataatggctagaccatcaccaaccgtgctccttaagagaacttaattagtttccttatttagcttattttctttctaaaaacaatggtttttgtgttttgattttatttgtttccttgttgcgttgttacatttaatttcggcccgaaggctagctgaagaactcttataaagtccccctacagcagttgtacgagttttacctttgattatcaataaagaaccgcattttctcacttcttctctttaagtgttcttaagagaataagcttgttctttgtcttctgtgtgcgattcaccaagaccaagttcatgtactgtatcagagacttatcacatctctgtggtgtacttcaatccgccagcacttcccctccattagatcccacacgagagaagcgatcgccatcgtgttagatctccatcatcaaccatctttccttcacaagagagaagcgaccgccagcttgtga

SEQ ID NO: 194762 - DNA, 468 bp, Arabidopsis thaliana landsberg
atgtcgcgatggacggtgcgcaagagcgacggtacttcttttaaagccctgataaccaatatttaaaatgctaatgacctattttttatgggaattgtttaaaaaaacgaccaaaaacgatgcctgttaatgctttgttaagctttttttaagggtgcgattttaggtttgccggacttatcaatcaattttccggcaccatttcctatgaatgattcagacttgtggagaagtttccgaaacggggatgaaacggctttttcaatgctttacaaatcccatatcgacatgctgtaccggtatggacataaactgagcgtcgacacacagctggtggaagactcgatccaggacatgtttatcgagctctggaacagccgcaagaggctttcagatacggatagcatcaaatattaccttttccgggtgttgcgccgcaagatctcgcagcacccgctaaaccgaaac

SEQ ID NO: 194763 - DNA, 365 bp, Arabidopsis thaliana landsberg
atggtgtctccagtgagttgctaacgggtgatccgagtggacgcccgtgccccgttcgataagggtaggctagtggcccaaaggcgcgctccaaaagtacctgcagctgatttgccggacccggtcccgtttgatagggtccgagggctcgatgcctccctctgatgggattccgttacaaaatcactcccgctggtctcggaaatgtcctagggtacctcgggagcgtagcccgagccttggttgtgtatcgaacgtacccagagtcatccctcgctctgcgtgctatgaggcggctgtcgaaccttcgggggccagcctacgaacccctgatcagtagtgggcgcggagcccgagtggcttga

SEQ ID NO: 194764 - DNA, 109 bp, Arabidopsis thaliana landsberg
atgtactggcgcgcgttgcagttgggcgaaccgcggctgctttcggagcgcgagatggccgaggtcttcgagcgcttcaagggctacggcaagtgggcgcaggacgccg

SEQ ID NO: 194765 - DNA, 322 bp, Arabidopsis thaliana landsberg
atgctggacaaggtaggtcggggaacggtgggtggggtggggtggggtggggtgggttgtgtttggattgtgggtgtgcccagtggcaagttgctgcgcagctcatatggcggtctgatggtcacatcttggcgctggctgatggaggggttacagttgcttgctgagcacagtggcactttcttgaactgtgcgatacagtgttgctgccacgttgacacagcgggccaaaatctcttgctgtcaacacccgggatgcagcaaatggatccgggctccagccccggtcaacatgacgctacaagagaaacgcaacctctga

SEQ ID NO: 194766 - DNA, 463 bp, Arabidopsis thaliana landsberg
atcgggacggtgagcagcgcggcacgcgaacgcggatcgagatcggcgagattgggaacgcgttgtccgccgaggtgggcggcgtagagatcgccgatttcctggccggcctgggaacggtagccgggaagcatccggacaggttgcgcccagacaccggtgccgtcgccgacgaagcgaagatggcggttttgcagttcctccttgaacggaacggtgaacgcgaggccgagacccttgatgaaatcgcggtgcgcgtcaccgtcgaaaataaaggtgtgcacgaggcgcacctcggcggagccggcctgaaaataaagacgcacggtgaacggcagccagtcgcgcgcggccgaggcggcggcccccgggccggggccggcgctggcgcggtgcaggccctccaccttgacgacgacgcggccgggcgaaaacgaacgagcgtgacctgcgtacgtggctg

SEQ ID NO: 194767 - DNA, 87 bp, Arabidopsis thaliana landsberg
atgcttcaagcaccctatcgtaccactctctttccattggcttaccaaacagaatgttctcttcgactttgccgctttggatccaag

SEQ ID NO: 194768 - DNA, 107 bp, Arabidopsis thaliana landsberg
cgcgcggtcagcgaggaagaactggtacgagcaggtcggccatctgatctggctgctcaagggtcagagctcagtagaaaagcaatacatcccggagaacgcgccgc

SEQ ID NO: 194769 - DNA, 486 bp, Arabidopsis thaliana landsberg
gtttatgcatccgggggctcaagttggataatcgatagcgggtgcacaaaccacatgacaagggagaagaagatgttctcctcatacgagaaaaaccaagatccccaacgagctatcacattcggggatggaaatcaaggtttggtcaaaggtttgggtaaaattgctatttcacctgaccattccatttccaatgtttttcttgtagattccttagattacaatttgctttccgtatctcaattgtgtcaaatgggctacaactgtctttttactgatgtaggtgtcactgtctttaaaagaagtgatgattcaatagcttttaatggagtgttagagggtcagctatacttggtagattttgatagagctgaactcgacacttgcttaatagctaagactaacatgggttggctctggcaccgtcgactagcccatgttgggatgaagaatcttcataagcttctaaagggagagcacatttag

SEQ ID NO: 194770 - DNA, 64 bp, Arabidopsis thaliana landsberg
gtctttatatggaggctactcaacaatttcctagcaaaataggaaccgaacgagaaacaaacac

SEQ ID NO: 194771 - DNA, 632 bp, Arabidopsis thaliana landsberg
atcatcggctctcgaaaacagaggaatctcggcaagacgtcccatcatcgtcttcttctttaggatccgactcggatccgaattcaggtcaacccgagaacccgtcaagaaacgcagcttcttctctcgttcagatatgggaggcgaggacaacgcagcaaccaccaagctcgaaccaatccctaatcgatagcagaacaagttctatgggatcaaacgctctagagaattcggagtctctcgaatccgtgaaagaatctgaaatgattcaaccgattgaagaatgtaacaatgaggaggaagaagaagagattgaatgtgcacctccacctttagaatctggagagaaagatagagaaggtgtgagagttatggatattattcggaaactaagcaacgactcggagacaattactaataatgacaatggaagcagcggcaatgacaatagtaaagaagttcaaacaacagaagcaagaagttttcctcaggttgcttgttccccaagaatcagaggtcgtcaagctttggctgatttgttggtgcagatgacgcgtgatcgagaaaaagacttggcttgtttacgagaacgtcattgtgtttcaaagttcacgaatcgtggaaggattcag

SEQ ID NO: 194772 - DNA, 129 bp, Arabidopsis thaliana landsberg
atggcgttggaaattcaggagagacacgccgtgatacaagggatgccacttgtcaatgtctctgatagacatttcgggtttagtcgtaaagccttcgtcctccatatcatccacttcattctattgagg

SEQ ID NO: 194773 - DNA, 428 bp, Arabidopsis thaliana landsberg
aagattcacggggcgattcgcttcatcggtacggcgcagatcgccgatactcgccggttgctggaaaccctgagcgaacgctttgtcgaacgtggcgggcgatacctgcgtgagcgcgtcgaaaaaatgatcatccgcaagggcgacgcctgggtggtgttgagcgggggtgagcaactgaccgccgacaaggtggtcattgcggccggtatcggctccaaacccctgctggaaagcgtcggtgaggtggtgccgatgatcgccgagcgcggttatcatatccagacggaggatcacgggtggccgaagggcctgccgccggtggtcttcgaagaccggtcgatgatcgtcacggggtttgaaagcgggctgcgcgccgccagcttcgtggaattcaaccgtcaggatgccgcacccgatccgcgcac

SEQ ID NO: 194774 - DNA, 316 bp, Arabidopsis thaliana landsberg
ccaattacatttccagacttctttttggcagatattctgacctccatggtaaaggtatagagagcttcctaacttctaatatttatatggttaggaactaagatattggtagcaaaggaggctcagtataactaatgctttttttttatctggccaactaatggaattggttccacatttctcttttgcatggtattttttgatgataactattattctgctgatacttgattcttattcatgatttgacatcggtaactatatgcaggtattttccgacttggagcgttctgtttgccggatggtgcatagacag

SEQ ID NO: 194775 - DNA, 368 bp, Arabidopsis thaliana landsberg
atgaaagagagagtttcaaaagggtttggcgaattcaattcaatgggtggaggagaatggtctttggttctgttcttggaagagatagaaaagttgattggaaatggtgaggagcatgggtgatttctttgtccatcgagtaaaggagtgttgggggaataagtggggtcacacaacttcactccttggtctccaaataattcaagctcgagtaaaggatcgagcatcttctagaattacgcattactcgatcgaacggtggagaattccttgttcttgatcactcgatcaaacggaccagaataaacctcaagaagtcactcgatggtgaggcttgtctcatttggtcattcaatccaatggcttaa

SEQ ID NO: 194776 - DNA, 141 bp, Arabidopsis thaliana landsberg
atgctttttttatcaccaagtcaagatgaatattatatgatagcggcaggaaattctttggctcttaatcggggcattcaagaagaacaggctgttccagctcgataccgccaagaatttttgactatcgcatgggaagag

SEQ ID NO: 194777 - DNA, 131 bp, Arabidopsis thaliana landsberg
acagattattcgggccacctagccatctggtgacgagctttcaccgcattgctgttatgcacaggaaagcagcgctccgtctcgataccacggatgaccaaaatccgaccagtgatgtcggcacgatgacg

SEQ ID NO: 194778 - DNA, 711 bp, Arabidopsis thaliana landsberg
atgaactatgactccatgagactacacaagctcgctgttttccagaagaaggcccttgcccatgcactatcctgtgagtacatacttgtctcatgttagctaaagcattataagggttttacttagcttttgaagaatctccttaacacgttgatctatgttaaacgcttactctagatatagatatgaatgaatgagaactaaaaattagtattgaacctatgcctatacactgtagttcctcaggttgagagagtagtatacagcacatgctccatccaccaaatagaaaacgaagatgtcgtctcatctgttttaccactggcttcaaccttgggcttcaaactcgctaccccctttcctcagtggcagcgtcgtggtctccctgtatttgaaggatgtaagtatcgcccttaccatctggtttcacctgatttactttgtttctaacaatgtgatcatgttggctttggcttgcagctgaacatctactccggatggatccggtggaggacaaagaagggttcttcatcgctttatttgtcagggaaaacaaactcgataacccaaaatcgtctgaacttcccaatagagtttgtagacgaagacgcaaagaaagaaccatgcaattacatccctatctttgtcccaaaatgttcagagcttggagtgggaccttgcacaggctcaagactaggttcctgttatcac

SEQ ID NO: 194779 - DNA, 199 bp, Arabidopsis thaliana landsberg
atttttatggacgagtgttgtagaagacgaagaagacgaagaaactgatccctttttctcgctcatggattctgattctgagagagcttctctggagtcgattaaagataatcctgaatgtgttcatgtttccaacgaacctaatctcacggcaacatgcgttgattcgtctgttggagaggaaggagtacggatgtaa

SEQ ID NO: 194780 - DNA, 1433 bp, Arabidopsis thaliana landsberg
atggaatataatgttttacacaagcctaccagcgaaaaagattggagctgcaactggagcaccagttgtatgggctatgtaaaacaaggtgtaaaaatgtggtaggagttggtaacgcctcttctaagttttgttaaataatttatgtttataaaaaaaaagattctttattaataagaagtttttggctatgttcaagaattatggaatgcagggtataatcgagttctttagttttataaaacgtagtacaccaaatctttttagaaaatgtattagatggacgtttttaaacaaaaatctccttttaccaatttctctagaaaaaacaggaaaacactgacgcaggtttaaactggtcattgtaaccttaaaggcaaaagtttctactcatatggactaagaagaattttaatataaaagctgccgctaaaatatttgtacttgattagagtcatggttgccccacttggctgcatggtagattctgactttaggttaatatgaatgtctatataccaagaaaactttcatagaattctaggtttctaaacatattttgaaattcagaaacatataaattaataagatttagatttagatatttgttttggcctttataaatgctaaaattgattttcaacgtaggttttaacaagggaaaatcagttttatgaagaaatacaattctaatttctaaaatcattttatgaagaaatacaattagaattgttgagtgcgatgttttcatatcttgaaaaataagtattttatatatatgtatgtcactaaacacccgtgaaacaaaacccaagttgagaatatatgctctatcttcaaatgttttaaaacaattaatgcatttgtccccaattcaaaaaaataacattttttttttggtaatgccaatttaaatataactgttattaaaagaaaaagtcttccgaatacaacactttcgagttttgttttgccaaaaaaaccactatcagtgttctataaataccaccaatagttttggttttccaaaagtaccataaccacaaaaatcaaaaaatttaaattcttaagttaaaattgactattttagatttacgttatagtttttaggagataaggtttatggtttagttttgaaagttgaaagtttaattttatttttttgtggtatttatgaaaaaccaaaacttaaatgatattttttgaacattaaacaaatgatggtatttttgaaaaaaacaaaacttaagcttgatatttcgagaagagcttttattaaaatttcagtttttgataatcttggttaatcatagtaaaaattatcactaatgttatcagcataagcaaaaattatttaatatatactaggttaatatgcggatgcactgtttcatgattttttcttagttagccatcccgtgaacaatgtctaa

SEQ ID NO: 194781 - DNA, 220 bp, Arabidopsis thaliana landsberg
agattatttgggagggatcaaaaaggatcggaagctgatggaaggtgagatcggaaggatcaaaagtggagagaagagacgaattcatacccaagcgaacggggcggacagcacgaacggagcgagcgaggaagttcatgactgtagatggtatagagtggagaaggaggttaaaggaagttggaatgaaaaacgattaattgaattgaatgcgggtacg

SEQ ID NO: 194782 - DNA, 107 bp, Arabidopsis thaliana landsberg
atgatcaccaagaccgcggtccgcatgcacgagctgggcgccctgcgccagagcctcctctacgtcctcccgggggaggcgccgccggtgaacagctcccctagctg

SEQ ID NO: 194783 - DNA, 566 bp, Arabidopsis thaliana landsberg
ggccgaagtgaccgcagtcacttcgcccttccactgactgacctgacaggaaaacagcgtcgcctgccccgttccgactgctgtgccacccgccaggtgacggctgacaatagctaagtccagcctcaggcgcaacaagaagctccacctcgcccgaccttgggcctcggtctcagaaggaggtcttcgcctcgcccgacctcagggctcggccccgcctcggcctcggaagacggtctccgcctagcccgaccccagggctcggcctcggcccaacctcagaaggaatcgcgtcctcgcccgaccccggcctcggcctcaagagaagtattcgcctcgcccgaccttgggctcggaccgaccgcaccaccgaggatacatcattaccctacccctagctagctcaggctacgagggaacaagaccggcgtcccctctagcttgcctcggtaacaagtaatgatgactccccgcgtgcgtccatgacgacggtggttctcagccccctacggaagcaaggagatgtcagcaagatcccagcaacaccgacagctgtgcttctatag

SEQ ID NO: 194784 - DNA, 31 bp, Arabidopsis thaliana landsberg
gtccatttgtcgagaatacgagatggtaaag

SEQ ID NO: 194785 - DNA, 134 bp, Arabidopsis thaliana landsberg
aatcagaaaagcaaagacgccataagaggatccgcaaacctaaagcagagggaaaaaaacaaaaggaggagaaggagaaagcgcgtaccatagtgaagaagaatccagaagccaaaatacaaaaccctaacaag

SEQ ID NO: 194786 - DNA, 1821 bp, Arabidopsis thaliana landsberg
atgttgggagaattcatagaagttggaagtgaccaaaggttagaattcgaggacaaattctattatggaggggagaatgtagtgacccgcataaaagcatcgggtaaggccaaaggaccgaatgagaaaattttgcccgatgcatggccaattgaccgcatgtgcctaataggtgccaaaccaacaaagggcaaagatgggaaagaatgggcacggattggcgaagatgggaaaagttgggcgtgccgcggcgaagattgccctgccggccgcggaaccgacttgagtagacaccacactcgcagtggcttgcggctcaagtcatttttgaaggagagagagagactgtaaggctgtccgactgataactcggtcgaaaccgagaaaaaattgcccaatttgttttttgtttttttttttttttttgtcaaagcccaaattctgtaaatcttgcccatggttgaggaaactctgtccatgactagagaatcgtcgcctgtggtcgagagaacttgaccgtgagtaagggatcgtcgaacgtgatcaaggagtttcgcccgagacccataaaactttccaaactaccgaatccgtgagttgtggttgaattgtgtgtttgtttgcatgttttctagagctagtctttagataatatgcatgattattcacttagacttaactaatcggattcggcttaagttagaacttgaatcttaaaaacgatatggtatttgacgaacttgataagtaatatcattaaggaatgggatggactggtacatgactaggctaagtgaatacagacttgaataagtttacttcctgaactgagatttgattcgggggcgttgtaatttttggtatcagagcatggttatgcgatgctcgtggacacttgggttttcaatgattttatcgagtaaatttgaatcgcagaatgcaacattagatttcggttgttcgtcttttaaatgactaagtggaggataggtttacctcgttttgtagatgtcgtctagcaaaggaagcaacaccgtcagtccgttacacgattttaatgtgcccaatcttgagaacttcgctctgccaagcagtacagatgatgaaagtttgtccgtagccatgaatgatcagtttatggcggaagatagtgaatccattgagtccgatatatcgattgaaccaaatccgtccgaatgtctggaaaatgctgataatcatgatggtccgttatctagtgaagaggcaaaccatgttgagtggatgaccaccaaggatggcgagttatttgcggtgccaactgagcatgcagccgaagaacaagcgaacgatagtctcaacaacatgttatcgcagttcaatgtgccatggacggatgagaagggaagttttggtgttccgaatctggggaccatgggcgagcatgggttagaactagaagaagtgaatgcagacttgttcgatgtgccactgatccatgcggatggtgcatttggagtaatgaatgagtatggagccaacgatgagtatgatatgctaatgctcatgggaaataacgaagaagatgagaatggagccaaagagaacgagttagagaatgagttagagcacgtggtcgatcagttaattgccgagtgtgctcaagactatggtccgaatggggaagaaggaggacaaaatgggaacgatgggggtgattcctcgtcggactcatttgaatccttaacgccagaacctaagagtccgagtgtgatcaacatctcctcggacagtttgaaagctatcttgatgataccgaatccgagcgaggcggattcatga

SEQ ID NO: 194787 - DNA, 747 bp, Arabidopsis thaliana landsberg
atgcgcctgcggatcctcctcatttccccacttaaccagacagttgagcgtaagaagaggagaggaagaagcaaccactcgacaagtgatcactcaaagcatagaggcaaaagcacaatctttaccgcaccctagtcactcaatgataagggtcgagcatatcactaaaccgcctcaaaactattgtcttctagtgacctagggttttcaactttttactataaataagtaattttggatttgtccaaaggaccaagcttttattctctgaaccatttttgtgatttagaatctttaaactctaattactatcaatctattttgtttttgcatttaattctttgaagaaagttgtttattttgcttagatctacaatttgatatgtctatagatatttctgggtttgtgttcttgattacgttgcttgagtagtaattagggttcttgagaatgaattagattagggtaatatctagttttgtaagctggttaagattaggtaagatcccttctggattagttatgcttcatgcttatttctttctgatcaattagaatttgccctgaggcatttcagcatccaaaagatgttctaatggtatacctgatctactaattctagagattagtttctctatcccaaagatggctctttggaaggctttttgactttaatctgttggtgcttagtgcctgatgagtttgagtccgtcgacaaaaccgagtctgcacctagctcagtttga

SEQ ID NO: 194788 - DNA, 103 bp, Arabidopsis thaliana landsberg
ctcagacaacgagggaagatgctctgtgattgcaagctgcctcacaaggaaatcactcattcaagctgcaagatcgaaccctttccctgcatcgtcatcaaag

SEQ ID NO: 194789 - DNA, 807 bp, Arabidopsis thaliana landsberg
atgaatacttcagtcactttacctactggttttggagttaaaatcacaggaattggtacagtgaagttgagtgatcttatggttttgaaaaacgttctctatatcccagatttccaattaaatctactgagtgtgagtcagttgacaaaggatttgggttatcgagtgagttttgatgaaaattcttgtatgatacaggatcatatcaaggggttgatgattggtagaggtgaacaacattccaacttatatgtgctagacgtttcctcaatcatgccccatgaccctcaagctcttgttgtttctgcaaatgttattgttgattctagtttgtggcatagtagactaggtcatccttctatgttgaaaacagatatgattacagatgtacttggtttaaaacaatgcaataaagatcaatttcattgttcaatctgtcctttggccaagcagaagaaattatcttttccttctaagaataacatctgtgataatgcatttgacttgttacacattgatgtgtggggtccttttgcagttcctacaacagaggggtataaatattttctaaccattgttgatgatcatactcgtgtacatggttatatctcttaaaggctaaatcagatgtgctgcagatttttccagactttctaaaaatggtggaaacgcagtacaagattgttgtcaaggctgtgagatcagataatgctcctgagctcaagtttgtggaattgttcaagtcgaaaggcatcattgcttatcattcatgtcctgagactcagaaacaaaactctgttgttgaac

SEQ ID NO: 194790 - DNA, 378 bp, Arabidopsis thaliana landsberg
tttttgactgctgtttctctagcgatgttatgggggaggatgagtacaaagtatacttgggtggcatcgtggcgcagctacaggatcatttcccagaggcgtctttcatggtgtttaactttagagagggggaacagcggagtcaaatatcagacgtgttgtcccaatacgatatgacggttatggattatccacggcagtatgagagttgcccgcttttacctcttgaaatgatccatcactttctgagatcgagtgaaagctggttatcgttggaaggtcaacaaaatgtattgttaatgcattgtgaaagaggtggttggcctgttcttgcttttatgttatcgggccttttattgtacagaaagcagtatcacg

SEQ ID NO: 194791 - DNA, 154 bp, Arabidopsis thaliana landsberg
atgggttccatcaacaaccttacagaagtgggttttggtccatgtctaaatcaatcatctccagtgtgcgtagccatcctcttgtcttgtatccagactctctgtcatgtccgagaacactctgttgtcaataaatgctcatgcactccatccg

SEQ ID NO: 194792 - DNA, 500 bp, Arabidopsis thaliana landsberg
atgaaattcaaaccaagttatacaagaccaatttgttgtgatgatcacgatgtgaagttgcaattagagcagcagtttctagctcaacttattaaccaagaggatatcaagattcatcagttaggaactgcgcaaaactttgtgatgggaaagaaagtgcttattgttcttgatggggtggatcgattagtacaattacttgccatgccaaaggcggtatgcctcggtcctggatctcgtattatcatcacaacacaagatcaacaacttttgaaggcgtttcagatcaaacatatttacaatgtggattttccaccagatcatgaggctcttcaaatcttctgcatccatgcttttggtcatgatgcccctgatgatggtttcaagaagcttgctacgaaagttacaagacttgctggtaatctccctttgggacttagggttatgggttctcattttcggggaatgtccaaggaagattggagaggggaactaccaag

SEQ ID NO: 194793 - DNA, 321 bp, Arabidopsis thaliana landsberg
atgtccacacaaaatgcagatgaaactccaccaagtgagttactattcaccttaccatcacttgaaatagtttgttgaagatttcatctttttccctagaattctatttggtatcctgattttactttttgagaatcatcacttgcattaatttgtttcttatagccgagattttgagctgatcaagaactcacctaaacttaaaaaattatgcagggcagagagaaaaaaagcggaaacctctcttggatataacaaggcctgacgttttgcttgcatcgagctggcttgaccatggtttagggattgtgaaagagacag

SEQ ID NO: 194794 - DNA, 77 bp, Arabidopsis thaliana landsberg
gtgcgaggacaacacccgacatgtcccccgcgggggtgccggcgtcgtcaactcgctctggttcgacagccgacgag

SEQ ID NO: 194795 - DNA, 174 bp, Arabidopsis thaliana landsberg
aagatgtcgaatttttcaacctaatgtctatgtcgacgatgttgtggctatccaccgtgtatcggcaccgtatcacttcacaacacacggcgaaaaccacacggactctatgggctggagaggttggacgattatcattacgtttgtgacaatctcgtgttcagcggttgcttg

SEQ ID NO: 194796 - DNA, 357 bp, Arabidopsis thaliana landsberg
atggcatcgtctggatcagccgacgaagatttccagtctcgcgttgcgaagatcttcggatctctacccttctctcgtccttcgtcttccaagttttccacgtcgtcttctgctccggcgtcgcggcagcaatcggggtcggtgtggactctctccgacacagaggtagagaagcgggagtggaagcgagattcgtacgatagagacgagattccttgtgcttcatcctttgacgagctcttaaaacagcagaagccttccgaggatgatctcaaagatattgattgcggcgaggattttgatggtgtgtggagtatcagagcctccatgggccttgatcgcactctcgatgacgag

SEQ ID NO: 194797 - DNA, 258 bp, Arabidopsis thaliana landsberg
ggtgaagggctgaaagcaaaagttgccgaattcgcgaccgacaagatcaatgaaattgcacgtgccaaaacagccaagcatgaaagaagcgaagcatttaaagcattaaaagatgcgcttattgaaagcctgggtgaagagccagaagagctgactgtaaaattggccaaaaaatattatgaagatctgcaatgggaactggtacgtaatatgatgctggatgagcgtatccggctcgatggccgccagctgaatgaa

SEQ ID NO: 194798 - DNA, 419 bp, Arabidopsis thaliana landsberg
atggcggactatttcggggacagcgtcgtgaacaagctttcccgggcggaattgcaaaagtttctgatcgcggaacacgggtcgatcagcgaatctttcgtgaacgcataccaggtcacggccaaaaaaaagtatctcagatgggcggagcggctccacgacgaacgcatgctggagccggcagcagccggaaaagacattctcaacgggtggcatgccaatacccagatatcgaagtttacgggttttgaaaatgttttcgactacacgggcgacgagacctataccgctgcggcccgctacttctggaagacggtcgtcagccgcagaagctgggtcatcggcggcaacagcgtagaggagcattttttcccgacagatgacttcgatcaggccgtcctgaccgctgcgggccccga

SEQ ID NO: 194799 - DNA, 165 bp, Arabidopsis thaliana landsberg
atgccgctggtgggctttcttacccaccatttcggcagtcgcaaggtgatcgtggtcggcggcttgctgacctgcgtggcgttgccgttgctgacgctggcgccgcatgcgctggcgttggcgctggcgctgctttatttcggcgcggcgatgcgcgcggtggac

SEQ ID NO: 194800 - DNA, 440 bp, Arabidopsis thaliana landsberg
atggtttcactctccacctccactagccacgcgccaccacttccgactaaccgccggacggcggagagaacttttaccgtccgctgtatctccatctccccacgcgagcctaattacgcaattacttccgataaaagcaacaatacctccttgtcgcttagagagacgagacaaagcaaatggctaatcaatgcagaggacgtgaatgaaagagattcgaaggagattaaagaggataagaacacgaagatcgcttcgaggaaggcgatatcgataatactccgaagagaagctacaaaatcgatcattgagaagaagaaaggctcgaagaagcttcttccaaggactgtgcttgagtctcttcacgaaagaatcactgctctccgatgggaatctgctattcaggtagatttcttcttctccgcaattatctcaaatgg

SEQ ID NO: 194801 - DNA, 433 bp, Arabidopsis thaliana landsberg
atcgtggtacaccaggtggttctcatgtacaaacaccagatcgggttatgctgagccatttcgtgatgatcgctataaccaaatacgaatggatcagcataacgcttatgggaacttgacgaggttggggaaaatagatttcccaaggtttgatggtagtcgtttgaaggaatggttattcaaggtggaggaattctttggtgtggatctgactccagaggatatgaaggtgaaaatggctgcgattcattttgatagtcatgcttccacatggcatcagtcttttatccagtctggtattggtttggaggttttgtatgattggagagggtatgttaaactgttgaaagaaaggttcgaagatgagtgtgatgatctgatggctgaattgaaacatttacatgaaacggatggtattgttgattatcactag

SEQ ID NO: 194802 - DNA, 703 bp, Arabidopsis thaliana landsberg
ggtttatctgtgacaccatcttgggtaaaagtctactttcaaggtagggtttgtgtcgtgtattacacatatacatgcgcgtttacttgggagtgaagtaaattatttatatggaaaatggtacgtactagatctaaatattaacatattcaactacggattcagccgaattctcaaatgaacaataatataataattatagcataattttgaaaaattataattatgaaatatcaaactttgacaattttggtcgtctgttgagagctatatatgaccagtgagcctctctatttggtgaagaagggtccatgagtgtcgagggcgaaaaaatctgttgacgttagggatatatagataattgcaaaaggacaaaaatgtgggggtccgatcagaatatacaaaaaatgatagagaagctgtgatgtagttctgtgatctgtccttgtttagcttcttctctccttgaagaaaatgaggttgaaacaaaagtatacgtacgtaacgtgaactctacaactctcaaaggacatgatatcgatgcactattaatacatgagagaactagttaatttaggaagaaaagatatacacatgacacatgcaagtaggtacatatatgatcttcttcaatttgtctcgttaaggattaatggaggaaatgagagctcgaaagaagtgttctatcacaagggatggttag

SEQ ID NO: 194803 - DNA, 43 bp, Arabidopsis thaliana landsberg
atggggccatacttcggctttggacgctgcgacgactttgcct

SEQ ID NO: 194804 - DNA, 151 bp, Arabidopsis thaliana landsberg
cggagccgatttgacgagagaatatggaggaatatgcgggaatggaggatgcacgagtcgagagagaaaggtgagtggactctacgacggcgtgcctgcacgacggagccgcgcaggacccgacggcggagatggatttaagatgcgatga

SEQ ID NO: 194805 - DNA, 202 bp, Arabidopsis thaliana landsberg
atggctagagtgcgttcgaccgcaagggtgactcgtgagggagaagaagctgtggttaccgagacagcaccaatttctgaagttatgaaacaatcaggtctagttgtggcagagggaacaacggacaaaggtacttctgccgccgaaactgaacagaccgttgctgaagaagaagatattgaagaggatgaagaagattata

SEQ ID NO: 194806 - DNA, 250 bp, Arabidopsis thaliana landsberg
atggttcgaagtccagcagaaggtaaagccaagcctggtttttgcgtctctgtttcacgtccagcagaaggtgaagccaagtctggtttctgcgtcattgtttcgagtccatcagaaggtgacgacgacaagtctggtatttgggccactgtatcgagtctatcaacagaaggtgaggagctatgggtggaggtggtagtactggtgttgagatcgactgtaagagtagtagatatgggagtgtggactg

SEQ ID NO: 194807 - DNA, 243 bp, Arabidopsis thaliana landsberg
atgaacgatggatcggcggccgagcagcagcgcgccctcgtgatgggcgccagcggcaacgtcggcgcctgcgtcacccgccagctggtcgcgcgcggcgacgacgtgcgcgtgctgttgcgtcgttcgagctccaccaaggggatcgacggactcgacgtggagcggcactacggagacatcttagacaccaaggccatcgccgccgccatggccgaccgggacgtcgtgtactactgcgtc

SEQ ID NO: 194808 - DNA, 653 bp, Arabidopsis thaliana landsberg
tccaccaccaccgtgtcctgaatcatctccaccaccgcctgttgtatactacgcacccgtgacacaaagccctccaccaccatcaccggtatactatccaccagtaacacaaagccctccaccaccatcgccagtatactacccaccggtgacaaacagtccaccaccaccatcaccggtatactatcccccagtaacatacagtccaccaccaccatcaccagtttactatccccaagtaacaccaagtcctccaccaccatcgccgctatactatcccccagtaacaccaagtccaccaccaccatcaccagtttactatgcccccagtaacaccaagtcctccaccaccatcaccagtttactatcccccagtaacaccaagtcctccaccaccatcaccagtttactatccatcggaaacacaaagtcctccaccacctactgagtactactattcaccaagccagtctccgccaccaacaaaagcatgtaaagaaggccatccaccacaagcaacaccaagttacgaaccacctccagaatattcatactcatcatcaccaccaccaccatctcctacgtcctactttccaccgatgccaagcgtctcatatgatgcatctcctcctcctcctccgtcttactactag

SEQ ID NO: 194809 - DNA, 724 bp, Arabidopsis thaliana landsberg
atggttgagacgattgctagagatgtatcaaacaaactaaacactacaatctctaaggattttgaagatatggtgggtattgaagcacacttgcagaaaatgcagtctttgttacatttagataatgaagatgaagctatgatagttgggatttgtggtccttccggtattggtaagactaccattgcaagggctttacatagccgactctctagcagttttcagcttacttgttttatggagaatcttaagggaagctataatagtggtcttgatgagtatggattgaagttgtgtctgcaacaacagcttctttcaaagattttaaaccagaatgatttgaggatattccatttaggtgcgataccggaaaggctatgcgaccaaaatgttcttatcattcttgatggtgtggacgatctgcagcaacttgaggctttgactaatgaaactagttggtttggtcctggaagcaggattattgtaaccacggaagatcaagagcttttggagcaacatgatatcagcaatacataccatgtggatttcccaactataaaagaagctcgtaagatcttttgtagatctgcttttagacagagttctgcaccatatggttttgaaaagcttgtcgaaagagtgttaaaactttgcagtaaccttcccttgggtctccgtgtcatgggttcatcattacgcagaaagaaagaagatgactgggaaa

SEQ ID NO: 194810 - DNA, 85 bp, Arabidopsis thaliana landsberg
accatataatttccatcagtttgattacgaggccgtggcagtcttggtggatgtgaaggcaaccagggatcggaccaagcgttga

SEQ ID NO: 194811 - DNA, 256 bp, Arabidopsis thaliana landsberg
atttgatgagacagaaacccagaaactgaaaaacaaaaacccaactcgtgatatttcgttccgaccaaatctgtctgatttgcgatctgaacaaagtacggtaatggagttgatggctaaaccaaccttctccatcgaagtctctcaatacggaaccaccgatctaccggcgacggagaaagcttcctcttcctcttcctctttcgagacaacaaacgaagaaggagtagaggaatctggtctaagttccgatctg

SEQ ID NO: 194812 - DNA, 349 bp, Arabidopsis thaliana landsberg
gcggttaggaatcttaagaagttggctaaaagatttgccatacagaataagaatatgaaaaagaataagaataagaagaggaatatgaaaaagaataataagaagaaccttcatttgtcccttcgacagtaagaaatagagagtagtgataaggagggttaagagactgatgagaagggtcgtcaactcttcgcataaataatgctgcaacatatcgataaaaaactagcaacaactgtccaggacattcaagggcactcagagaaaagtatacaaagcagcaattgatgcagcaaattctagccggttgatttccgttggtcaagactccagtcttcggatgttgtag

SEQ ID NO: 194813 - DNA, 33 bp, Arabidopsis thaliana landsberg
cgttttcgatatgttttgacaatggtgaagatg

SEQ ID NO: 194814 - DNA, 259 bp, Arabidopsis thaliana landsberg
agatcggattggccagcttctcaacgagcttagcgatcccatgagactgggatctaggaggtggaacccaaaaggaagcaccggggacaaaagggagccaatcaggtgcggatcggcgtaccataatccggtggacagcatcttccaacttattgacaagaggatccgcagcgatatcaatctcgtagattactccgagatggttagagttagaccgacgattcgaggattgagatcggatgaaaatggtttgagatga

SEQ ID NO: 194815 - DNA, 122 bp, Arabidopsis thaliana landsberg
atgcccgccgattcagaacgcctgccctcgccctaccggcttgaatccgctgtcgtcgccgagcgcctgcaggcgctgcaacgcgccctcgactggtcgtcggccgcacgcaacgccgcccc

SEQ ID NO: 194816 - DNA, 134 bp, Arabidopsis thaliana landsberg
gtcactccattgagcctaccaccatcaaacccaacggtgccaccgacttgaacgcactcctattgagattctggcctacgcacccgcacgatagctgtaccaagttcatgaaccacacccagaactaccggtaa

SEQ ID NO: 194817 - DNA, 941 bp, Arabidopsis thaliana landsberg
atgcgtagaagcttctctgttttgggtccttacaaatggctaaaaccttcttctacatataccaacgtttactgcttcgtcacaaatcctcctctcatttctaaccctaacaacggctctgcgattttccgatatctatcttacttcgcacctcaacaacgaagacaacaacaacaagcaccagatccagatgatccagcgaatctattgaaagaagatggagtatctctctgttctcagatgtggcttgagaatttcaaagaacctgacaaaaccgctactaatttaacctcgtatcttcgtagattcgagttatgggtattagcttatcagaaagtttgctgtgatgaattaggtgcttatgttcctcgtagctctattcaaagatcagctttagagaatttgttagctttaagaaactctgttctcgatgatcggtttaaatggggttctcggttggatttctatattaaatctcctagagataagaccgattacgagtcgttgtcgaagaggaagattaaagcgattttgactactacgcagcctactccgtttcaggataggatagttcaggaggttttgttgatgattttggaaccgatatacgaatctcggttttcgcaaaaatcgtttgcgtttcggcccgggaggaccgcgcatacggtgttgagagtgattcggaggaatttcgcgggttatttgtggtatgttaagggtgatttgagtgttgtgttggatggaatgaaagttggttttgtgattagttctttgatgagagatgttagagataacaaagtgattgatttgatcaaatctgcgcttgttacacctgttgtaacgagtaaagttgaagatggtgagaagaagaagactaagaagagaaaatatcagaaaaaacgggttttggctgaggatgagcccaagcctgatccttattg

SEQ ID NO: 194818 - DNA, 309 bp, Arabidopsis thaliana landsberg
atgaccttaacaactatcacttgtaagtgagaggcaaatgaaccgagagagctcgagcaggtctcactttgtcaaaatcagaaaacaccactaactaactagttagccatgtagcttgacataatcgtggagaatttagtttattgtatgcacaaaaggacccgtaactccaatgtccgattttggctagatcctgacaacggccccggagcagcggaaatacgcttgacacatcaaatccatcggtcccaaccgggaatcaagattgaaaagaaggaggaacagaacgactgtatccatcgcttacag

SEQ ID NO: 194819 - DNA, 1602 bp, Arabidopsis thaliana landsberg
atgcagttacgagacaagaggaaagctcctttggagctatcgacgaatgtgaggttagaagctgtgaaattagggtaaacagtctctatggaagaagcacatgaaacaaagacaaagagaagattgagactaagtaacaccaacatcaacagaaacgttgatttcatagagaaaccactctgtttgtttttgttattattacaagaagtggatcatcagagaagaatctgaatgagttcttgtttttttttgtgttgtgttgttaagtttgaccagaaacgtattattggtgtggtggtgaccattatcatcaccttataattgtttattttaggaaggcaacgtttgaatgctttgaaaattacacaagggaagatttagtaataaattgcggcgagcatttatgaagtaggccagttttctttcttacgatgactattaggttttatttattgctcaccgaaacttatacgagtttgatgttgcactaataatttatttttttagttttttaattaattttttttgcaagaaaaaacaaattattcattttttcttcacattaaatttcgtttcagaacttaaatttggttacataataattggtttatattttaaatgtagatttcaactctgttcgattcacaataaatattattttaacgttttttacacgaatttaaaaataaaaacacaaattcaaatttaaattatattccttaaaatcatgatgacttttagtttttttttttatagagatgaggttatattgaaaatataaaacgatattatttttaaacaatttatttgtataaattgtactctttctacttcaaaaaattttatttataagttttttgcatatatattaagagatcatttatttattcttgtatatagataaaaaacatcatttattatttacctaacacaattcaaccaataaactccaaaatataaatagtcaaaaaaacatataaaatctaatgaactttgtatagaaaactgaaaacatcatttaatctgaaacaaaataattatccgaaaacatcacatattattattataaactgaaacagaagaaacaataaaatttccatttttatctcactattaaagtgagaacattatgtagactttgccactagaccatgaacctttctagtgttcatttcttctaccttatctgttttacttccttaagaagttttcgattttaccttcagaaaatcaaaatggtaaaaaaaggatatgggttttctctctcaaatttttcagagaaagaaaactgaagactcttatggtcgtccgaaattctttctggctttgtctctcgatagggattatcatctggcaactaccagctctttccggtgttggccagctcttgtccggcattattcggctttcatatcgataatggtcggctttgccgtcagcgctcctttgcttcttttcatttttcttataaattagttttttttaatagaagttgcggttaaacctcatcggatctgtgtattagtggtggcgtttgtggcgattctccactcaaaagggtctacatatcctttaggtttacggtttatggaaaataattag

SEQ ID NO: 194820 - DNA, 666 bp, Arabidopsis thaliana landsberg
atgaagtgtaatgacaaaatggttgtgatcatgggtgccaccggttctggcaagtcatcactctctgttgatctcgctttacattttaaagccgagatcatcaactctgacaaaatgcagttgtacgatggcttgaagatcaccacgaatcaatcgaccattgaagatcgacgtggagtgccacatcaccttctcggtgaactaaacccggaggctggagaagtcacagcggcagaatttcgcgttatggcggctgaagccatctccgagattactcaacgtaaaaagctcccaatccttgccggtggatccaactcatacattcatgctctccttgcaaaatcttatgaccctgaaaactatccgttttctgatcacaagggctcaatctgctccgagttgaaatatgattgttgtttcatttggatagatgtggatcagtctgtgttattcgagtatctttctttacgtttggatcttatgatgaagtcaggtatgttcgaggagatcgctgagttccaccgctctaagaaggccccgaaagagccattggggatatggaaggctataggagtgcaagagtttgatgactacctcaaaatgtacaagtgggacaatgacatggataaatgggaccctatgagaaaggaggcttatgagaaggcg

SEQ ID NO: 194821 - DNA, 1322 bp, Arabidopsis thaliana landsberg
atgatcttggcatctccttcaagccatagatccgtcaacccgttctctagagccagctcgagccctcttttgagggctgcgaattctgccatggtgcttgtggcttcccctatggattctgagtacccaagaaggaactcggctttgtggtttctgaatacccctccaatgctggcttgtccttctcttcctctggatccgtcaaaggttatctttatccgtccattttcaggtttcttccacacaactttgacaggctgtttgtggtagtctcggattaacaataaagtagcccgggtttgcagcaacccttggaatctagcaatctttgtgaaagctaacatagggtttaatttttttggttacagattttcttgtcgtgacaaaatggtcgactcagatttttcttctggctctatagtcgctgtgttataccaagagtaggcaatattgtggaaggggtttgttagggaaatgatccttgcaaggaaagcaaagaatgatccttaattgaattgaaagggaaggcacatttgcagaatttagtaagcagtgttatatgaggaatgttttgaagaatgattctgtttcaatggagattttaagtagaagaagttttaacgaagaaaatttaaataaacatgactacttttgtcttatccctaaaatactgaaggtctctcctcaacctcaggaggatctctctttctctctccctctctagaaacttgcaagcaaagaaggaatgagaaacagagtttacccacatttcccggaaacataagttcttatacatgaagttatgatttatgttggttctgtttacgaagcaagattcacaacagataaacaactaagaaatgattcaatatggagaacacttgtcataccgggggccacttgtcataaaaagaaaaacttagtgtccaagaaacagagcgatccccattcaaagaataataatgcgatactctgacattgtctgatacttttttcccctacatcgtggatccatagcctcttcgaccaaaccggaaatcacagagttcggtttacaactcgagaacctaaattaaaaggatcctaaagccagagacaagtaaataagcaaaccgaaccgttgaccctgttaaaattacttaagctcagcattaccggtcccggttattatattattcgacccggaccgtcgtcctcactctatccctcagcttaatccgccgccgttggttcaaacgacggtcgtattgatcttcactgattggatctttataatccgtacaaactcccggagctcttgggctatcaatgtccgggattga

SEQ ID NO: 194822 - DNA, 667 bp, Arabidopsis thaliana landsberg
acgccattacatctttaagccgcttaacaacaaccgtggtaccttcctataacaccgtcttatacgatgttccaacacttcctttacctaaaacctcagcagaagctctaagcaaatcttccaaatcaaaactatatactcctccttcagtgaaaacaagcttattcctctctgtttcacctcccatacccgatgatgtccccgttacttcctctttcgaggacgaagcacccggtggaagatccacattccttgtagctactcccgccggtttcggctgcttcgtcctcgcctcattacttcctcttctttttcttaaacacaagaacaaaagcagcgctagcaaaagaagcgcaacgagcgcgctagcgacgattatcgcgacaatcgcagctttcgaaagctgggatttcttgctggataaacgattagaaggattaatcaacgacggagacggcgagggagacacaaaaaacgatttacaaggctttaacggaccaccacagagatctacatttccagtaaacgattcagctgagaatcttgataatgaagacggaatcgaaccgtttagattgttgttagagacattgaaatcgactaaaccgagactaatactaggaagattccctgagaaaccattgttaccgagaaacaaaccagtcaa

SEQ ID NO: 194823 - DNA, 200 bp, Arabidopsis thaliana landsberg
acttgagaaaacttaaatgcaccaaccgaaaaactcagagattagcaatggctgacagagtcatccgagctgatgtagaaggagttttgagagatgaggatgggcaagcctacaatgaggctggtcagagattggatgattatggactcgtcctacctgaggacgtcaataagaatcagcaagcctcaatgcgcaattag

SEQ ID NO: 194824 - DNA, 342 bp, Arabidopsis thaliana landsberg
atggggaaccaacgttcttaccgcagtgttcgcctgcacttctgggcgtccggccagcgcaactgctattactgcagtgtgccgatgacgaatgtcggaggggtttcaacctctctcacagccgaccacaaatcgcccttgggtcgaggggggcgagatgatcgagccaattgggttgcatgctgctaccgatgcagcaatgccaagagcaaccttacggagcctgagttccgcgaactaatggcgacgggtaaggcattcggcaaggatcgcgccaagaagatcgcacttgccacacagatggtaaatgcccggcgtaagcgccagcttcgcggcgcccag

SEQ ID NO: 194825 - DNA, 164 bp, Arabidopsis thaliana landsberg
gtcaaccgggtatcatcaacaacgatcttcagactcttctcgaggtgaagaaatctttggtcacgaatccacaagaagacgatcctctccgacaatggaactctgataacatcaactactgttcttggaccggagtcacatgcgacaataccggtttatttcgg

SEQ ID NO: 194826 - DNA, 200 bp, Arabidopsis thaliana landsberg
atggagaagaagaatgtgtttctgtggtttgtgatcttcttattggtggggtcatcattgatgtttgagagagttgattgcagagctctacgatcaaaggcgttgagagatattaaaggccatgatcaatcgtcggtgatcatgaaggtgaagaacaactcgacaagtcaacgtactttggggaagagctttgcttaccg

SEQ ID NO: 194827 - DNA, 73 bp, Arabidopsis thaliana landsberg
atgaaaaccctaaaaggtgccgatttgtcggatgaaacaaaagcatcaaagttgtcaaaaataaaacaaaagg

SEQ ID NO: 194828 - DNA, 153 bp, Arabidopsis thaliana landsberg
cttctaagtagagacgaagaacccaaattcacaacaattctcgaggaagttttccgattagaagaaaaccctagaatttttataccgtatttgacggttaaccataaagctcgtcgaagtcgccagtcaccggaagtagtaaagcaaccataa

SEQ ID NO: 194829 - DNA, 199 bp, Arabidopsis thaliana landsberg
aattgaacaatataaccacaagatccggtttgaagttgacttggtgaacaatctcatcgtcgatcatcattccggcggttgtatattgagtatatgtggttgctctcccgatttcatgatcaaaacgttggatcaaacaaatcaagctgaatcgcctttggtatcgtcgacggagaaaccaaacaaaagagaaagctga

SEQ ID NO: 194830 - DNA, 729 bp, Arabidopsis thaliana landsberg
atgggtggaattcctcaccggaattggattttgccgtcgtggctcatatccttccggggacacaatgttcgtgctaataagctctggtaatccccttttccctcttcacttttcccactagatgcgcttggaccgtattaggttgggattcatacacggggtcactggagatttccttgccgaacccatgatgtgacggaacctcccaaggtattaggtccacctaaagttgtccttgtcctaaggaccttggacaaccctgtagatgcacataatcactcgacaagttcggtaactgtatcctcatcatttcgcccaagagcgcttcacctattacgcagatattacatcacatcgggtggaagaataagcagaagcatattacaataacttaatttacattcataaaaaatatatagagagagtattattattacaataccagggtattatgagtgcacaaagtattattatagaccagggagcaaaacaccctcccacacaaaagtttattgttttcaaggtgggaggcagacatcctcccgcgaccaacttcattgctagggctcttccataagtaccacatttgaacaaaaacagcaaaactttgctgtttcctcacctacaacaacatgggttcgaaaaccctgagtacggggtgtactttcgcaagtcttactcgacaaaaggaaaagactctcaaggatatgctggcttgagggagtcaag

SEQ ID NO: 194831 - DNA, 142 bp, Arabidopsis thaliana landsberg
atgtgggtactcgacctcatcggctatgtggcggccagcaccactctgaggatactcgacctctctccccctgttgcggccagcaccgcggtcgaaaaaacttcgagactgcagaagtcttctactcctactgctagatcga

SEQ ID NO: 194832 - DNA, 279 bp, Arabidopsis thaliana landsberg
gccggcgccgacggtggcggcatcgccatagtgcgcgcccttggccaacgcctcctgcagggtacgccagccggaaagctcgccaccgcccagcgacttgttcgcggtgaccacgtgatagccgcgtgccagccattccgcatggcgcgccgccagttcggcgctggcagtggcatcgacgatgacttttacggctgcgtcgctggcatccagtgcattgagcaatttcacgtcgtcgcgcgcatcaccctgccgcttcaactgctcgcgcaagccacg

SEQ ID NO: 194833 - DNA, 306 bp, Arabidopsis thaliana landsberg
atgaatcttgaagctggtatggtaaacggaaatcttctcgggaggaaaacccggtacgcatacctagccatagctgaaccgtggcctaaagtctcaggattcgctaaagttgatctttctaccggagaagtgaaaaatcacttttacggcggtaaaaaatacggtggtgaaccttttttcttacctagagggttagaatctgacggagaagatgacggttacattatgtcgtttgttcacgacgaggagagttgggaatcggagcttcatattgttaacgccgttacgttggaactaaaagcaacc

SEQ ID NO: 194834 - DNA, 306 bp, Arabidopsis thaliana landsberg
gaaaatgtaagggagtccagacaagaaaaacacgctttcatgaagtataaaactcccaatacacgccagttgaaagtcactgaaatgcgtaacaaggtactgcatcatcgccacaaagaagggtcagtgtcacagctagaactgtcaaactaaagagctaaacatgattgccaaagggagataaaatttgttcaattccacgaaaactgaaggcaattgtatatcattgacaccatccatgctgttacgtcacgcagaaaagcgagttatgaagaccttgaatggaaacctattgctgatgaacac

SEQ ID NO: 194835 - DNA, 403 bp, Arabidopsis thaliana landsberg
gttcatgagactacaactcgaagctttcttctccttcgtgttgttgaaagttacagctttcacaggcttccttccgttacaagaagtttcccttgaaggactaatcaacttttgtcgacaacccgctttcatagtcgaagcttatgtaaactacgactgtgatccgatgtgtagaaatatattcgaagagaccggaaaagttctatgcaggcatactttccctacctctggtcctttaacctctatacaaatccaagcttttgaaggtcttgtgatcttgattcacaacatcgccgacaatatggatagagaggaagatgagggtaatgaagaagatgataataactccaatgtgattaagccaagccccgtagagattcatgagtacataccctttggatag

SEQ ID NO: 194836 - DNA, 457 bp, Arabidopsis thaliana landsberg
  unsure (1)..(457): unsure at all n locations
atgctcttcgtcttcatcatcctgtacacatcaaagcattataaggtaaattcaagttttaaggaaaaggtaagcgcaaggtatgagtttattaccggtttaaggtgacttcgagcttcgtcaccagccaggtttcgcctgccctttgcccagatttgagtaatgaatctgtttctgatgcttcggggcagaccggggatgtcatccaagtctgctggtgataggctgaagtttggtctgtttacaatatnnnnnnnnnnnnnnnnnnnnnnnatgaaagcgacactttgcctcgagaagctagcagggcacagaaatcaccatgtccagctataatttcatcgagagcatcaacttcaccttcaatatgatcaaatgtgcccggcagatcttcaaccgaagatttaaatttttcggagctggctcaacggagttaaagacctatttcagccgttga

SEQ ID NO: 194837 - DNA, 268 bp, Arabidopsis thaliana landsberg
atgtcttcatcttcatcagctgctttcttctcagctaatcagtctccgtttttctcaccaagatctcctaaaatccaacaagaactatctgaatctactcgctctgatgctcaatgtgatagctttgatcctcttagctccagctctggttttcaagagcctgagcttgcgtttttaaccgctcctaatcaatgtcagagccttgaggctgctgatcgaatcacttcgagtagtatgatctcttgtactccttctagatatggaagag

SEQ ID NO: 194838 - DNA, 499 bp, Arabidopsis thaliana landsberg
atgacatcgtgtgttgccaagcaggagacatcatttatagagcaggtggtggctgatgaaagcgagatgcaaggtgttccaccagcttgctcgagtatactgaactggcatcttcacttggatgccctggatgtcccttatccacaagggtgggcgatccaaaagaatctgcaggctctcataactatgaaatagtttgaagatagttttgactggtaagatttataaggttccgaacttttaatgtgaactcaagaccgtgaaaagtcagtgtttgtttggatttggaaagggtgaagctagctagttgatccttaatcaaaattcggattctctacctattgatggtgctatgcgtgtttgtttgcagaagaatcatctgacttctccctcctatatgtcttgcaggtttctacttaccccatgtgctgtgctcattactggatatatatcaaagaagcatatgaagaatggaagaagacgagcgagggtagtttag

SEQ ID NO: 194839 - DNA, 400 bp, Arabidopsis thaliana landsberg
atgagccctgaaaagtctccaagcacacaacttgtatgtaaactagcacgttggtctttacacgtgtagaaccatatctctggatcggctttggcttcacaaatgtcacaccaacatataccactagccttttcaccatagcatagtgagagaggatgatcgtcaactctatgctttaccactggtggtagagtggcgcaattgaagcatattaaatgattacattcatattcaacgcacacgagcattccatatttgaacttgtaacaaccattgcagaatatttttccgtaaggtaaaatgcaatataagggatgatcgggatgacttggatggaaaaatggctcagaaattgaaccgcaccgaacatcgaatgatttatacccttgctggtacctga

SEQ ID NO: 194840 - DNA, 572 bp, Arabidopsis thaliana landsberg
atgatgagaaccaaatccatagtcatcaattccaattccaagaacgatacttccaccatttccgcaacgacagctctgagacgttcggcctcaaacactaccccctcagctgcagtggtacgcacaaatgatcttaacaaaaaaccgcgacctcggtcagtagagttcccggcatctcctcaactagtacaaggtgaagagatggtccatttcggacatccccaacacgtgttggttaaagttgagttgccggatatttacacgtgcgcagggtgcaaagaagagggagcaggggttaggtacgtgtgtcaagaatgtgattatcagctccatgagttttgtgctttggctcctcctcaactcaaatcacacccttttcattaccagcatcaacttctcttctttgccaaacctggtacgtttttaattattactgtctttgatatccttatttgttagacctgaggagtatttttggtattaattacggaaatggctcaacttgatcggttttatttcttccgacaattttaagctaaatgtcctttgtttgtttttcagccaagaactag

SEQ ID NO: 194841 - DNA, 1528 bp, Arabidopsis thaliana landsberg
gataaaccgaagaaaaaaaggaatttggttcatattcggaacatatgttttaggctataaccgacccgaacaaaccgacgtccgaaccgacccgaaccgaatttcaattcgggtctattcggtgagatttttagaaaaccgaatttccaccaaaccgaataacccgatccgaataacccggtttaaccgaactcccaggcctagtttttcggagcaaactcgcaatatattgatccaaaatatctaaagagaattgatctctgatgtaaactcatgtaaaaatttcacacttcaaataaaaaccattagtccacccaacttgattaatatgaaaaaccattaatatattttttagtagttcacttttagttatagtttagccgactaaggttacaaactttccaccaataccctgagaatctagacatgaagaagacaagaaaacaattttttatattttggtttttttttttttttgtagtcactacgcatgaagaattgaattcgtgcagtagttatcatttaataagatacgtaattatcatagacttcttctcaagaaatgaaactaagaatagagtcttgacgaaaacaaaagagaggtgagaatagagtctcctccgttgacaaagacaaaactcgacaacgaaaaaaacacaagggaacacaacaaagtaatgtgccaaattcgaaaagcccatgtatgtaatattgattgcgtgcggatgcaagatccgggtttgttgaatcaaaaatactggaaaaatactagcatcggagtgcatcgattaatcaaaaatactagtccaaagatcatcgacaacgtggaccctatatgaggatgcaactcggagtgcctaacctggaaaaccggattccggttaaaccattgcacatttatttacatgaccgctaacggtagatccgccgttttagaccggtgactgttatgattatctaatatcgcattcaattccattaattctcattataactcttcttttaatctttcgttaacattcctaattttacgtttcttttcccacaaaaccagtttttaaaaacttaacgatttatatttgtttagggaaaattagtataagagctttaattattaaacaagttatatatgatccctttaattaacccgtagataaagcaaatgaaaccccccacctgcaccacgttattagtctattgacgttagttcatatacttaagtgaaacttatttttttaattaaatcgtgttgtaaaaggcaacgaatttgcgttgtcttttttttttattagtaaagaaatagtcatttcattttctttaattcggtcacaagtctcttgacattttcgtctatatatatattagtattatcaagaaaacgatccatcttcgagggaaagagaaagatcacaagaaaagctctctcagaataatcgcaatggcttcaaagctcgtgatcatcattgtgttcattctagatctcattgctgttggattagccattgctgccgaacaaagaagaagtgtc

SEQ ID NO: 194842 - DNA, 258 bp, Arabidopsis thaliana landsberg
atgatgctgttggttaacagggatcgatcgatcgagtcaccggatcgttcgatcgatcagtgtttaatgtatctgtttcgcttaactgtgataactggatcgatcgatcgcgtcgtgtttaggatttctacgtcatcgggcaaaagtgttggatcgatcgatctggactcatggatcgatcgatcgggtcgtgtctgtgacttcagcagagcttggatcgatctgtcgtgtatcaggatcgatcggtcctgtgtctga

SEQ ID NO: 194843 - DNA, 379 bp, Arabidopsis thaliana landsberg
atggcttggtatgagcgtcttcgcgacttcctcatcgaaaagggcttcaagatcgggaccgtcgacacaactctattcacaaagaaatataacggtgatagtttcatttgtcaagtatatgttgatgatataatctttggctcgacaaatgactatcattgcaaggaatttggtgagttgatgtcgaaggagttcgagatgtcaatgattggtgagttgacatacttcctcggctttcaagtcaagcaaaggaaagatggtaactttctctcacaagagaagtataccaaagtcttgttgaaaaggttcaacatggagaagtgcaaaccaatcaagacacctatgccaacaaatggacatctcgacctagatgagggag

SEQ ID NO: 194844 - DNA, 112 bp, Arabidopsis thaliana landsberg
ttgtttggctttaaatagcctaaagatgaagactcagtcttcttacaaatacgtgaaagagaaattgcaggaactaactgaaacaaaactaaaaactaggacaacaagttga

SEQ ID NO: 194845 - DNA, 155 bp, Arabidopsis thaliana landsberg
ggattcatggagggcctgaagatggaccttcgagtttgatagagagatggaaatctcaaggaaattgtgactgtggaggatgggatttgtgttgttccttgacccttcttaaaggccaaccacggaaagaccagtacttcgaactattcatagag

SEQ ID NO: 194846 - DNA, 69 bp, Arabidopsis thaliana landsberg
aaaattgaaagaacaaacattcgtcattacatttcaaagaatgtggacattctccaagtgacccattaa

SEQ ID NO: 194847 - DNA, 129 bp, Arabidopsis thaliana landsberg
atggagataactgccattggaacgaaaggcacacttcgtgtacacgacttcattatcccatataaggagactgaggcgtcgtttaccacgagcactaaagcttggttcaatgaccttgtgactgcgtgg

SEQ ID NO: 194848 - DNA, 182 bp, Arabidopsis thaliana landsberg
taccacatatagtcattagtgatggaggtaagcattttgtcaataaaatccttgcaaaattgctttatcagtatggagttaagtatcgtgtggctacgccctatcaccctctaataggcagatcaaagagattcttgagaagacagtgggaaagtcgaaaaaggattggtctttccagttag

SEQ ID NO: 194849 - DNA, 528 bp, Arabidopsis thaliana landsberg
atggagaagccggaggtatgggatcgagtgagtggtgtggtcgagtgtaatggagtggccgagtgtttggtgaggaagagagatggtgagtgaagtttggtcgagtgagagacgtgagggagagtgagtcttcgaggttgagcgtttggagaggaagagagatgatgtcggtgggaaaggatagggtgagatcgagtggtagggaaggagggaagagattttgttatctctaaaaacgcgtgggggaacaaaggtgagaggtggtgggccacgctctgtctgtttgtcctgaagcactgttctctgttgcctagaaccttctgtaatcctctgtaaacttgttaaactccatgcaagtctctgtagcttctgttggtcgagtataagtataatttcaaaattttgttttttaaaatcatcactaatactcgaccaacttactcgacctcatggcttcttagtgcaacagaagtttttcaaactcttgaatttttgacatactcgatcccctgttgctctgtagagtaa

SEQ ID NO: 194850 - DNA, 69 bp, Arabidopsis thaliana landsberg
atggcaagtaccctcttaagtcgatacgataaagattccgaaagcgtaacagcacaattgctagatgaa

SEQ ID NO: 194851 - DNA, 200 bp, Arabidopsis thaliana landsberg
gtaggtatgcctggcgcaaaaaagggacaaatattcttcctggtaatgccaatctggtgattcctacagatattatgaccttgcctaaaatcttccaacaggctgggtatctgacaggggctgttggcaaatggcatttgggattaggagaaaagtttcccattgactggaatcatgaagttaaaccaggacccagagaa

SEQ ID NO: 194852 - DNA, 309 bp, Arabidopsis thaliana landsberg
tctagacatcctaacaggcctctacgaattcatgatatcccccaaggcaatgccccccacactcctagatacaacagtctaaaagagatcgcattcctcactacaacatcgtcatgtagcgcccggtcggttgcaagcccgccccgagcctttgaaagccataacattacgaagtttcacgcaacgcacaacagacagatgggaagacctcattcgactatgctagttatcttaccacctctaactaacaacaaccaaatcccaaacagacaacacaacggcaatgttaccgcaatgcggacagcataa

SEQ ID NO: 194853 - DNA, 678 bp, Arabidopsis thaliana landsberg
acccgcaagaatgtctatcatcaggaagggctagctcaagctcgtctactcagtcagagaatagctgctgtgtggagtgtccagtctgtgaaaggtttgtgtgtgtggactgtggtgttccttggcatgcttctatgagctgtgaagagtttcagattcttccagttgatgaaagatacccagatgatattacattgcatcgcttggcaaggtataagaggtggaggcggtgtcagcaatgccgtataatgatcgagcttgctcaaggctgcaaccacatgacttgccggtaagacacacatatatatctatggctacacattgttttccgtatctatacatatttgaaccaccaaagttaggtttttgacttccaataaaatatagttagtcttgaccctttaactgcagaatcacggtatcgtaataaccatatgattctaaggttttttttttctcgcctacgtttaaatctagtattctagagcaagtgtttcttttgcgattcttacgcatataaatgtcaaaactctctgtgttttccgcagatgcgggcatgagttttgctactcgtgtggagcagagtacagagaagggcaacagacttgcacgtgtgctttttgggacgatgatgaagaagaacaagaaaacgcagtagaggaaaacacaattcaagaa

SEQ ID NO: 194854 - DNA, 100 bp, Arabidopsis thaliana landsberg
atgataggagcaggagcggcaaaaactggctcgttacggataagcgttggaacggaacgggaagacgaggaggaggaagatgaggaagaagaagaggcgg

SEQ ID NO: 194855 - DNA, 440 bp, Arabidopsis thaliana landsberg
atgcctaactcacagcactatgcttgcatggttgatcttcttggtcgagctgggcttctagaagatgctcacaatctaatgaagaacatgccctttgagccagacgctgcaatttggggaactttacttggtgcaagcagagttcatggaaacacagagctagccgaaacagctgcagataagatatttgcaatggagcctgaaaattccggtatgtatgttcttctctctaatctatacgcttcttcgggtcgatggggagatgttggtaaactacgagtgagaatgcgggataaaggggtgaagaaagttccagggtacagttggattgaaattcagaacaagactcatactttctcggttggggatgagtttcatcctgagaaagacgagatctttgcatttttggaggagctggatttgagaatgaagaaagcagg

SEQ ID NO: 194856 - DNA, 108 bp, Arabidopsis thaliana landsberg
aaagtctcgtttaattcgcgatcatcccttaattcatggtcgactgcgtccattggcatgtgctgttcaatattgggctcgtagaaggatcactaatggtccagaaag

SEQ ID NO: 194857 - DNA, 415 bp, Arabidopsis thaliana landsberg
tctagttcatctgataatgacttgtcagaagatgccattatggattttgtgggcgaagcatgtaataggtgtgcattctacctggatatactccagaaatgtagcagacgtaagattagacagaatattgttcatattctagaaaattggttgtcagctgaacatctgattagacggttaccaggccctgaggcaattgtaaagcaatgggttaaggtaatttttttgataaagtacctttaggaaaaaattgaactacaagtatctgagtgtgtgctatcaacagatagagcgggaatgtcacacggatctggatgcggcaggttcttgtacaactttgtactcattgttatcatcttctcaaaaaaagtcaaagcggggtatcggaaaaatccttgagcaggttgggatctga

SEQ ID NO: 194858 - DNA, 254 bp, Arabidopsis thaliana landsberg
atgcgccggtccccaaaatcgtatccgacctgttttcagctcgccgggaccacctccggtcccgggttagtcccttcagggcgcttcacaggccgggagacgtaccgccgtaaggcaagcggacgcttcctttcgccgcttcagaaccgcctttcacatttcggaaacgtttacgagaaaagaaaacgttttcggtaacgttttccaaaaatatcattttgaaaaagcttgacacgggggatctgaacgattag

SEQ ID NO: 194859 - DNA, 97 bp, Arabidopsis thaliana landsberg
gaaatccgcccttactgctgttccaaaagattctagcaatcgacatttaaaagggcgcagaaatctaataatctcatctgaatctgaacaagaataa

SEQ ID NO: 194860 - DNA, 118 bp, Arabidopsis thaliana landsberg
tgtgatgttgcagacaacagccatcttaatccagatgggcacggcacgggtcatgtagatcgactgaaggctctctcagcaggttgggtcacgtcatatcggccgaagaagacattag

SEQ ID NO: 194861 - DNA, 868 bp, Arabidopsis thaliana landsberg
atgttcctgacggtttgcgttgacaaaacaagcgattataaatttattgacggtgagcatgtacgtttcacgtttgtatagtctataccgtatttagctggtccaaacagttcacttggaaagaaagcaagatcaaattatatacaatggaagttatcttgcttgctatacttatttattactcttataccaatccataaacttcaaaacacttgtaatagttatattttcttgaaaattccattacaatcgagttcatgtacaataaatcgtggtatgtcaatgtcatcctggcttgaggtcggggaaacaaacatttgtatattcaacgaaagacttcttctgtatataaactttttcgatatccaaaagtaccgaccatagtttgttttacatattgtggggccaatcattgccgccccattggcgttggggcttttgaagttgcagccttgaccacaaaacaaacaacataccaccatctagtcatctagagtttattaacaccttcgttttttcttgaccaagaactatgtttacttccagcagatgcattttttggaggttttaaattgtttgattgacaaaaacataaaaattgaacgatcttcgattatgaacgaatatgtttttctttatattatatatgtaaacatctactattttttacaactacataaacaatctgtttatgtgaaagatttagatttgctagtatatcataagatacattatcttcattaattttagtcagtcaacaaactcatcaaagtcatctactccaagaattctagactagctagttgccaatcatttcttaatcaactgttttgttttcccctcctagctaacagtatcaggtacgtga

SEQ ID NO: 194862 - DNA, 262 bp, Arabidopsis thaliana landsberg
aattcaggacatctttaacatagatatcaacaaatatggcctgcgaatgagaaacaaacagattgatgatttaaaaaaccaaaaattgagaggcaaacaaaacatttgcaaatctagtttgtttaagaagcagagcaaaataggaaaagtgaatttaattatacctttgactgttcaaatagagcaggagacgaacaagagaactcaagcagtagtcctaataactcagggctatccttgtacggaatccgtgaacctttaa

SEQ ID NO: 194863 - DNA, 1444 bp, Arabidopsis thaliana landsberg
ttactgctttaaccacaaaagggaaccaactgccagaggatgttctgctaaagacgatagacgcttgtgatcgggctctggatcttgattccgcaaggaagaaggtccttgaatttgttgattgttgcattgtgtgtgtcacattctaaacctaatgtgcttcttggtctactcatagccatctcatgcttcggaaacaccctcctcctctgcatctggatacaagtctctggaaaacgtaaagcatatcaatgtagctgccaataggtactatatatttctttccaaacaaaaatgatggaactctgtttatctttctctttacttacatattggttctgtgatatcaaaagcaattaagaccacagaaaaccgttgaggcttaacctcaaacatcgaacaaaaagaccgagactcgaactccaacaatctaatggtttcccaatttgtcaaaagtgtactataattatatcttctaaacacccaacaaagtattagccatcaacttataatactctaaacttgatttctctaaatcttttcataccgagacatctaaagtagcactatcaagattactacccgtgacctcagcctcaattacaaaccgggaggtcacaagagtttcttataaacacggttttgaagaagctaaaatggtaaaggtaatggtgtataaatagaatactaagtgcggctaaaggtttgcaaatgagtagtcttatggtggttgtaataaaacagaggactggttctcgaaagagcggcaactaaatggataggtggctgtttgaattttgtggttggctgtatcgctttctgttgcgattggtcatcttcctctgcttttattcattgttctgttactgttaggctgaacttttgtaactttgcaagtacgtaaactaattgtaccactctgattagtatacttcttgataataacattacattcattttatttcaaatttacataccgacataaaccaaacattcctcaacgataaacaagatgaaaaatagaggtttaaaaagaatcgacaaataagtttaatgcgtatacgttaaacctccctgtaattgtgtacaaattacttaagtgaaaactgaaaagtgaaaaccttttaaaaagttaaaacgtgtctgtatatttgaattgattttgtgggttaacgttgtcgattgactactagatgtgtatgatattctctatatttgaattgattttgtaacaaaccatgcggtcataagagtttcttctaaacatggttttggagatcctaaaaattttcggtaacagaaaacagagtgcggctaaattaagcttcggatttacaattgctaacgttgcttttttgctgtgatcaatctttttcttcttcttttgtttattgttctttatagtttggctaaactttgtaactcgagctgtgaagtactttaa

SEQ ID NO: 194864 - DNA, 3823 bp, Arabidopsis thaliana landsberg
atggggcagttccggcgagggtgtggcacagtcaggcggactcagccaaattttggtgcacattggctggctccggccaaggtttggcatggctgggcggactatggccaaaggtcggtgcacatcggcgggcttcgaccgagatttggtacggccaggccgacttctccaggcagcgtcggttactcaatgagtagctgggccggttatcacggcgcctagtgatgggtccaggtgactgtaacacccctatccagtcctaggcccatgacggatcaggagcgtcacatggacgcccgtagtcagccaacctaggctcgcggaacgaatcagtttgcccaggttgtccgaccgcgagtgcctttcctcacaaacgcggcctaaagctttgcaacccgtacaacgatacgtgagttgtgatagtccggacaagactaattataccatgagagacatggggctttataaaatcagagctttattacttatcgataaatcgagtcttacataacatatatcaaaactatagtctctacaaaggcaaggaaacctacaccggttggcctaacgtcctttgtacccttaaggtctccctactaatggttgcctgcaaaagagagtaagggatgagcgctaatcgctcactgaatttgggttcccctaaacatgcaataattccccgcccaaactcaaaataccaagtaaccgagcaatgcaacaatcaaattgtatatacttcacagagtatacacaacaatgcgcaacgaaaataaatatgcatgcaactaactactcaaccactaaacctagggccccgcgtattgatcttcccttcccttagtcatgaacacctatacacgtagccacaaaggctaaacgagtatagaacatgactaagttctgagtaccatattgtggtggaaactcaggctacatcgtcatgcagcactcgaccataagttgcgagcccgtcatctccgagtcttcgtaccattcgtgtgtagggaactagccactatgcacacactactaggatacagccttagggaaccatgacacacgcaaactatactaatatgcatgaaactaactcatgcaacaaacaatcatgcacaagcaaatatgaaccatggggacttaacctcgcatggtttatcaacaatcaaccacacaaaatcaagcaatcatacaagcaagatttaatcacaacgataacccaattatacgacttaacgtataaccgaggatccaagcaatcaatgcataattaacacctaatccattctagttctcatcaaacaattaaacaaacaagttggtttacatgcgttcatcgaacaacatgcaaccacatgcaacacgcataacctgaactcaccttggcactacaagaaatacttacattgatagcaccgaaagatagctcattttccacgactgctattaaagatgagtttaaattttggttattatatgatagcatttgataaacgttaagataaaagttctataagcgggattctaaaatttcttacgccgctcaaaaaattaaaacgaaaatctaaaattttagttgtgaccgcaaatattacacctttaacatcccacacttaaaaaaaaaaaaaaaactcacttgtgacctaaattttctcttcatgcctacccaaaaacgagaaacccagattcgaatgggtgaagatgagatacaatttccttttcactttatcagtgaattaataacggcgaagaagtcaaagtttcagagattgtaaaagaggtgggcttttttgtgatttttttttgtcttcctcttgaacgaatctggtttggtaagaggagttttgattttgatcagaatcgatggagttgcgacgtagatctccgtgaagaagaacggagataaaccttaaccctcattccagtgttaactttcttcttcttctcgattcagatatcatctgatttgtcttgtttgagctacaggaacactctcaactgaaggactagctcttggcatagctagactctctgtctcagctgggaattcgaagaactcattatcattaacaccctaattttgtcaagcccacatagattcaaagagaaaatggcgaacgcttctcgtttcctttccaaatcaggtgatatttgcttgtccttcgttttgattctcttttctttgaggctgaaccatggcgattaagccatcaaaccaggaatgaataagacctacaatttgctttatcaaatgtttatgtggttttctttatactgacgaatgttttgaattattgtttctgtcgatcatgagtttttggattatactaaccaatcttttataatgtatttaatttgattttttcattgacttctgcagaggtaacttcaaaaacacaatgaggtagagctttctgcatttaaaacgggtatagaccgtatagtctcttaaacttgttctatgatgtgtttggattaatttctcgtcttataaacttgttgttgtattccgtcttaatgttttgattttgaagggtcaaacttgttgttgaaactgatgaactgttattttcttctcttgttgctgaaacttaataatgcagttggggcaaatgggtctgggaaaagcaatgtcttatatggtgagattgagcctcttgaattcttggtttcgaatgcagtaattctttttatattctggataaatcaacatagatgattgaattctcttggtagcaaatttgattcagatttccagtataattagctatgttactttcatctttatacatgagtattttgtcactatgtgcatgtttcctttggtcgtttattcatatgtgtgttttggccacagttttgtctatttgtttgcgtgttttagttggtctaggttcttcaatatccagaagccaaaagagaagagcttcggtttagagcaagaacttcctatatctaatattcatctctttgtcttttaattccttattgtaatttgtgttttcaggtttctcataatctatgtggatttggttgttgttgttgttcaaaagctcaaggtttggagacacagcctgaggctaaggagaaacctaaagagaagtaaaactcggtttgccttacctctgacttaatgtattgtttctatatgtgatattgtttgcatttttcaggaagacgtgacttctgtttgtgtcttctctcttctcctatgcatcttctgtaagtaattttgtttgtgtcttctctcttctctgattggatttttagtcaagcttttgtctgctgctgcatcttctgtctcttaacatcagattcttgggtttcgtagtcctcgcagcttctgtcttcttctcattgagtttcattttccttatttgcttcagcttctgtcttcttctcattagattctttgcattttttccccttagttgcttcaacatctacataaggttaggctcacatggactcgcattcttttctctgtttgcttatgttgtcacatttcccttgttattagtcttttcctctgcatgcttcttctctccatcactcttaacaacaacttcatgtggctcttttatttcagtgtcccttgatgccttcaactttgggagatttttcaacttcttcgacactctcagtcttcttctccaactccttcaatactgcaaaagatatggagaaggcagtgaagtctgaacatcaacctgagaaggcagtgaagtgtggatatcaacctaagttcttggagggagataagcaaaccaatgtagttcttcatttagtccaaatgaattgcagtacttatgatgttgaatgctaa

SEQ ID NO: 194865 - DNA, 674 bp, Arabidopsis thaliana landsberg
tgttcatgccggtgaaggcaaactggtgcctagagcaaagaagtgcatctttctaggctatcctgcaggggtaaagggatacaaagtctgggtgttggatgaaaagaagtgcacagttagcaggaatgtagcatttcaggaaaatgctgtttacaaggatgtgatgcaaaaaaaaaacaaagatgatcaagatcaagctgaaacatcaagagattctttcgacatttatctaaaaggccttggagatttgagtttaggtggagacctcttggaagaaacaggatccctgggaggtccttcacaaactcaggtcaatctctaagatgatgattcagagaacaatgaagtggtgactaatactcttgacagttaccatttggtcagagatagagaaagaagggaggtaagagctcctaggcgctttgatgtggaaggctattacagtgagtctgcagatgatgaggaatcattaaatgctgaagcccttgtcaccacttttgatggagataccatcgaacctgcaagttatcaagaagcactgaaagatgatgattgggttctgtggaaggaaggcatagatgaagagatggattcactgttgagaaatgatacatggactgtagtcacaaagcctaaagaacagagagtgatcggctgcaaatggattttcaagc

SEQ ID NO: 194866 - DNA, 189 bp, Arabidopsis thaliana landsberg
atggtttggaatagagtactcaggctagtactcaatctcaacatcaaaatcaacaccaccggtggtatttcactacggagcagtgaggtgcacaccccagtggaagaagcacacgcgttgctcgccaacagcacactgtagtcgctcccaggccatccaacaaagaacgtcctgtgtacagactccccc

SEQ ID NO: 194867 - DNA, 58 bp, Arabidopsis thaliana landsberg
atggcggcgcttacagcggaaccagtgatggacgcgaacgccgtgattgcccacctct

SEQ ID NO: 194868 - DNA, 286 bp, Arabidopsis thaliana landsberg
atgaacgaagcgaagaaaacccaatgtgtttacaacctgggccggaccggccggtcggaccggtctaatctcgaaccgctgacaatacggtccgttggttgaaccggcgacttactttctaaactttgattcattctccctaaacaatcgttgtggtagattaatttttctttaagctgtattagactggtttgggtccccttcaagaatgtataccaacttcttgattcccaatctctatttaaaattacaaatcaagaagacaatgaaaaacaaccgtcagtga

SEQ ID NO: 194869 - DNA, 601 bp, Arabidopsis thaliana landsberg
atgcagagagctgaggaaatgtattcaaggatggtcgaggatagagttgagccaaactctcttgtatacactacgattatcgatggtttttttcagagaggagattcggataatgccatgaagtttctggccaaaatgctcaatcaagggatgagacttgatataacagcttacggcgtaatcatatcaggcctttgtggtaatggtaaactaaaggaggcaactgagattgtagaagatatggagaaaagtgatttagttcctgatatggtgatttttactacaatgatgaatgcatattttaaatccggacgcatgaaggctgcggttaacatgtaccacaaattaattgagagaggctttgagcccgatgttgtagctctttcgactatgatcgatgggattgcgaagaatggacaactacatgaagctatagtttatttctgtatagagaaagctaatgatgttatgtacactgtgcttattgatgctttgtgcaaagaaggagactttatagaagttgagagattgtttagtaaaatctcagaggctggacttgttccagataagttcatgtacacttcttggatagctggtttgt

SEQ ID NO: 194870 - DNA, 1044 bp, Arabidopsis thaliana landsberg
  unsure (1)..(1044): unsure at all n locations
ggttcatcatcaagtcgtacttctgccaaacaaggtttttactttttagtgatgtcgtcaaaaggtacaacaactcaatcaatccacgaaatatcaattgttaaagcgaggaaatcaaattagggtttaaccgatttcgagagatcattcaagagggtttaatgggtatcgttgcttccaagggagatagtaatactccattgttgaatctatgtaaggagaggaaggaattgatcaaagcagctagagatgctcgttatcacttagcgagatctcatcttctttactttaaatctcttttagatttcagcaaagctcttaaacagtttgtttcataaggatttggttgtgattccnnnnnnnnnnnnnnnnnnnnctagtagtgatataatttgttctggatcagattcagactctgatacggattctgattcagattctgattctgattgtatagtctgtgatcaacctcaaacagctccgttgagcaataatgacgatcagagtcagcgaaaacccgtggttggtgatggaacttgcggtgcaagtaacaatggtcaagagggtatggagaagtcaagagaaggtttagggtttgaggggacacagttcgttagtgatccaagtgaagacgagatgaaaagttcgcaacacccttatgatatactcggtttctacaaatccgtgtataacatgcagcagtgcgaaattatcgaactggatcatagagatgatgaggttgagagtgatggatttagagaaattagggagagagaagggattcctgatttggaacctgaaagtgattataatagtctgataaggaagaataaaaagaagaataaaaagaagaagaagaagaagaatgttagagaaagctcttctgttgcaagtgaaattgataagcgagatgttgaagcgaatacttgtaatggtcaagttgcagatgagactgataattctaatgaagcttgtgcgcaagagacagaaaacactccagagattgttacggaagaagtgacgagatcagatgaggaagttgaa

SEQ ID NO: 194871 - DNA, 412 bp, Arabidopsis thaliana landsberg
gcaaagcttagaccaaacctacttaacctctgctacaacggtgacaagaatcacagctcccactgttgcttaccttgcacctgaggctcgggcttcttctggttgcaaattatctcagaagtgcgatgtctattcgtttggggttgtcctaatggagttgttgactggccgtttgcccaatgcttcctctaaaaacaatggcgaagaactcgtgcgtgttgtgaggaactgggtcaaggaagagaagccgttgagtgagattttagacccggagattctgaacaaaggtcacgcagataagcaagttattgcagccattcatgtcgccttgaactgcacggaaatggatccagaggttcgtccgaggatgagatcagtgtctgagagtctcggccggatcaaatcggactga

SEQ ID NO: 194872 - DNA, 618 bp, Arabidopsis thaliana landsberg
atgttcttgttttcaagcagtgatatagaggaggctcagtttgttatggaacatgcagagggtgattctgaggttcagtatgttgttgctgtcaatgggatggatctaagttcacggagaagttcccttggattaagtcctcccgggaacaatttggatgaactacttcatgggaattttgataggaagatcgatcgggctgctacagaaccagcagtggcttcgcttactcccttagcaggtaatgaatctttaccagcgagccaaacttctcaacctgtaacaggattttctactggaaatgagccattttcacagccttatctaggacaacaattgcagttccccggacttggtaaccaccaaatttacacgtcaggtcacatggcaagcataggctatatagatgagaagaggtctgctcctttacatgttcaaccacaacctcattatatcccgtattctgtgaatcctgaaacacctcttgaaagcctggtgccccactatccacaaaaacctgagcaaggatttttgcgtgaggagcagatctttcatgtacaagatccagaaacttcatcaaaagaggccaaaatgagaagagatgactcatttcagaag

SEQ ID NO: 194873 - DNA, 94 bp, Arabidopsis thaliana landsberg
atgagacgatatctgccttcttctgactctaccacttttctctcgcatgtgaagaaactttgctacgtagatgctgattatgaagttgaattaa

SEQ ID NO: 194874 - DNA, 441 bp, Arabidopsis thaliana landsberg
caacaaaaggtcgagggctggtcaacccgtttctcaacattggattgtttcgcctacctgcctaccgctcccacgcatggcgtcggaagctggccccccccttgaggtatcatgattagaatgggccgcaacagccccttccgcctgctcgtcctgctgtccgccgccgtcctcgtctacgtcttcttcccctcgatccggcaatggggcgactgggtgcggcagacgaaccccttctcgggccagaagcacatcgagtcggccttcgtggccaccgaggccgagctcgcgtgcctcaacggccgtcccctccccggcgatgacccttcggacacggacgcggccgacctgatccccaacgtcgtccacttcatcttcgggctcaagaacccgctgtaccaccgcgacgccggccgcttcgatttcttgagctacctcgcc

SEQ ID NO: 194875 - DNA, 69 bp, Arabidopsis thaliana landsberg
ccttggtcgttcctgggttcgttgcttcctcatcgtgcccgttccaggggggcccgctccatttgttgc

SEQ ID NO: 194876 - DNA, 501 bp, Arabidopsis thaliana landsberg
ctttagagagtttcgatatcgggcggagaagcagtcttgagcctttggttgttgatgttgttcttgtggtgaggccacttgttggtgatcagtctggtaaaagggagcttatcaggaacttctccgggaaagattatcagtctggttggaattctgatcaagatgaattgggatgtgagactaagaacgagcagattattgagagatgggtggtgcaatatgataataggaagatcagggaatctgttactactagtagcaggaggtcaagcagtaataagttgcaagtgatgtataagaaagctactctgctgcttagatcattgtttgtcatggttaggcttttacctgcttataagatttttcgggaactcaattcctcggggcagatcttcaagttcaagcttgttcctagggtcccttctatagttgagccattcactcgtaaagaagaagcagaaatgcagaagttttctttcacaccggttgaaacgatctgtg

SEQ ID NO: 194877 - DNA, 1002 bp, Arabidopsis thaliana landsberg
aaaagcttcacccttcggtgaaatgcttaaaagagatttctcaaaccaagtctcaagcaagactccaaaaggagttgcagaagagaaagatctgccatgatgttgaagcaggaacaacatcaaacgacaactactcatacatggagctgggtccaagccaggctgatgtggagaggttttcggtttctttcgtcatgctactgaaggaagcaacagacaagataagttgtaacacagcagacgatgcgttcaagagtgaaactgccctatgtctgagcagtctagggttctgcattagcagattaatgcaggaaacaatatgtattatgacagaaataacccatacaacttgattttggaagaattctagaggatgttagtacctatagcacaaaccattttgtaagaaacgtttggtgtacaaaattaatctaaaaaagagcaaaaacgaagcaaattgtttctctagagcaacaaaacatagaaacgctgcaaacagaacaattctcattattaactggagttcatctagctctagctctaacagatacacggactcgtgattggtcttgtatcaatgaacatgtaaatccaaacaaacatatacagcaaagctttcaccaacctatcagataacaaatccgctcataatttaacatgcaagacccggaaattgctatagaaacaagccttttatagcgaattatcaaagtatatgaataacagcactacaaaaaaaaaagatttctgcagctaaaaccaagtattacaaaagcttaaacatcttccttaagagctacaaaaaaacatcttcaagtatcgaatctgaatgacatgttgagtctgacataacattgtagaaaccaacaatgattctgaacctcatttctattcgaatttagggtcagccatgacgaaatggtaggcaatcaccagtatgaaaatgaagattcccaggaaattggcaaagaatcccagatcttgatcgtcaaacatctgtaa

SEQ ID NO: 194878 - DNA, 40 bp, Arabidopsis thaliana landsberg
gtacattggtcatgaagaaggtggacaactaactgaacct

SEQ ID NO: 194879 - DNA, 201 bp, Arabidopsis thaliana landsberg
aaaaaaaaaatcctaagaatgctgtcgtctaacgtatcggagacatgcacgaggaggaagagaggaacaaagagaaagattgaaattgagaagcggttcacaaaagaacaacgatccatagcttgcagcaaacgccgtctaactctcttctccaaagcggctgatctatgtcttctctccggagccaacatggtcgttttc

SEQ ID NO: 194880 - DNA, 321 bp, Arabidopsis thaliana landsberg
gtgatgcaatccgtacgaagtgtcgacgaacttgccattgaggtagaaaccgggcgtgccgcggacaccgcgggcgcgaccggcttgcaggtcctgcaggacgcgcgcctggtgggcatgcgtctcgagatcgccatggaaccggggcaggtccagtccgagaccttgtgcgatgccggccaggagtttcccatcgagctcgcctgtccggctgaagacgaggtcgtggaactcccagaacctgccctgggcagcggcggcttcagccgcctcggcggccatttcggcgtgcggatgcgcctgcggggcctgaaagtgccg

SEQ ID NO: 194881 - DNA, 181 bp, Arabidopsis thaliana landsberg
atggagataaggagacatcttggagcaaaagctcagaaaaaggaagctaaggacgattttgaattcaggtatcaagaggagtgtcgatcgacacactctttttgtcgatcgacacactcttggtgtcgttcgacaccggttttggccctacaaagtcctagacgctttctagtctccagaa

SEQ ID NO: 194882 - DNA, 316 bp, Arabidopsis thaliana landsberg
atggcgttcatgcggctgcagtacggggccgagagtaaatccattgtgttacaaccgaaggggaagcaccttgagggttttgtggggctaagtacgggtgtgatagtatttctgatgtgagtgaaggcgttattttggttacgcgcagggtgagaggagcgagcattgcgttgaaccatagagtcggcaacgacaggtggtgggggcagtaagtaaaattttggtttaaatgcgataactggtggttaactagatcgtgggtgccacgacagcagcagagtgagatcaagccagtggagagagagtcgacaaggtg

SEQ ID NO: 194883 - DNA, 363 bp, Arabidopsis thaliana landsberg
ctcgtctggtgactttccaggtgcatggacacctcggtacgtagaagttactctatccgactggtgcgttatgcgtggggtaattaagtctcagcattaaggcgctcaagtaatccggttgtgtcgatgaccggcaaggatgagtctcatatccgtagtacgacccgaaaatgaattgcgtgtatcatccgtgaaatttagtgtatcggtttgagccgcccgcaataagttaatatggccgcaaggtgctggtataagcagaccaacacgttgatagtcaaccagtaaaaactaatcgtctgagcaatcgtgcctgcttatacgttacggagtttgcgccgaatggggtgcatattgtgactg

SEQ ID NO: 194884 - DNA, 93 bp, Arabidopsis thaliana landsberg
atggaatcaaccttcgttgattccccacttcctacatatattgcacttcattacctgactttacaagataagggacaattagaaagtgataag

SEQ ID NO: 194885 - DNA, 186 bp, Arabidopsis thaliana landsberg
ctatcaacgccaaagtcagctgcgatagaatcgacaagttcttccgcatgcctgataaggccgataatgtccacccaggcgctgcgatatcgttcagcaacgccaccatcacctttcctttcggcgccgatggtccaacggaagaccaatttgctctgcgaaagctcaaccttaacttccccagca

SEQ ID NO: 194886 - DNA, 213 bp, Arabidopsis thaliana landsberg
attttggtctccgataaaaccacagctcgagtcttaaccgtgaaaaccggttcttggtactcaacgaaccaattcttgctctcggttatcttccgagagaggatgaaacactacgagtgtttgaccaacaactcttctctagcctcagcgatttatgtcccatactacgcaggatttgatgtgagccgtcacctctggggatacaacgtgacg

SEQ ID NO: 194887 - DNA, 116 bp, Arabidopsis thaliana landsberg
atgggatatgttagatttgaaactgtgaaaaggacgcaaacaaatggagagatgagaagcggcacacgaagggaaaacgcaaacgcgcgtttgaacatatcaaggtgggacttaag

SEQ ID NO: 194888 - DNA, 548 bp, Arabidopsis thaliana landsberg
ttcttttgcagtttctttctttcacgggtggaattgtgttcctaactctgatagtgaatggatccactactcaatttgttctacgccttcttcgcatggatattttaccagcccccaaggtcaaaaacttctctcatacgaataactttccgagttttaagtaatcaaatatatgtgtaaacagagatttttttgcttatgctttgtattcatgtgtaagtgaccgtgttagcctgagtctgagcctttaagctgtatagttcaatagggtctgtatgttctaggcagtaatgtattcgaagaaccttattagaaaccactttccttttgacagaaacgaatattggaatatacaaagtacgaaatgttgaataaggccttacgagcgtttcaagatctaggagacgatgaggagctaggacctgctgactggcctacagttgaaagttatatttcaagcctaaaaggttcagaaggggaactagttcatcatcctcacaatggctctaaaattggaagtcttgaccctaaaagtttaaaggacatac

SEQ ID NO: 194889 - DNA, 60 bp, Arabidopsis thaliana landsberg
gtactaaatacaacatcatttgatgtttatgtcgatcgtcttcgtcacttagctacttaa

SEQ ID NO: 194890 - DNA, 54 bp, Arabidopsis thaliana landsberg
atgactaagaaagtctctacggacatcttctccgcggaagctcggaaagacttg

SEQ ID NO: 194891 - DNA, 601 bp, Arabidopsis thaliana landsberg
atgtgggattttagcggggacaacagcattatattaagctcggagctggcctctgatgattgcttcggaggtgaaggacctgttgataacggagtcgttcaatgggaccgctttgcctcttataatgaccacaatgcggaggcctggaaaaagtattatgagggcatttaccggaccaatcagtttttgaaaaaagtagatggagtcgacttttcaacaaaccccgatcttaaaaagcaatatataggagaagcaaagtttttgcgcgcctattattattttgacctggtacgtatgtttgggcatgtcccactgattacagaaccgatcgaaggcgataattatgctatcgctcaggctagtccagatagcgtatacacgctgatcagtagtgacctgcaggaggccattacagacctgaccccttccgctgtaccctacaatcagatcaatgcggccgattatggaagggctacaaaatgggcagccgaagctttgatgggccgggtgtttttatattataccggctattacagcaaaacggctttacctgatggttataccaaagaccaggcaacggccgccattgatgacgtcataa

SEQ ID NO: 194892 - DNA, 596 bp, Arabidopsis thaliana landsberg
cacagtttatgcaaacgcctcgtgaagatcattggttggccgcactgcgtgtagttcggtatctgaaatctgatccaggacagggaattctgttaagagctgataataactttcaaatcacagggtggtgtgattcggactgggcgagatgtcgcttaactcgacgttccgtcactggctattttgtacaacttggggagtcacctgttgcatggaagacacgtaaacaacgatcaacgagtaggtcttcagcagaggcagaatacaggtcacttgctaatctcgttcaagaattgatatggttgaaacgtatgttgggtactcttggagtgaaacacgaccagccaatgatagtccgctgcgatagcaagtcagcaattcacattgctacaaacccggtctttcacgaaagaacaaaacacattgagatcgattgtcatttcgtgagagatgaagttgtcactcgcaatatccatttgaaacatgttgatacaaggtctcagcttgctgatatcttcactaaaccaattgggagagatggcttttggcgttttcgatgcaagcttgggatacaaaatttgtatgctccagcttga

SEQ ID NO: 194893 - DNA, 101 bp, Arabidopsis thaliana landsberg
tgagacaatcactccgcaagtttcgtctctttgaagctgtttctggttttcaaactcataatccaacgattcttgatcttcctctaatcaaagctttccag

SEQ ID NO: 194894 - DNA, 125 bp, Arabidopsis thaliana landsberg
atggatgcggacgcacagcgcgaaggcattaacgcctctgcccgttacccgaaaaacaaggttttcattttcgcagccgagcgggaggttaccatgatcataatcgacaccggtcctgctgttgg

SEQ ID NO: 194895 - DNA, 219 bp, Arabidopsis thaliana landsberg
atggaaaactcagcactaagcaactgtgtgaggcgaacaaatttctctaatcaacagagaactatgcaagagggtctagaagagagtagttggacaatgtactttgaaacagaagatggattaggccattacgatgattcttcaatgatgtcagacgctgcttctcctatgggttgtatcgaagaagacaccgcttcatctccttctaacagaaccaag

SEQ ID NO: 194896 - DNA, 373 bp, Arabidopsis thaliana landsberg
gggatgctcatcgggcggtgatactatttcggttaatgtgaatcctaaaccacgtgtgcccactgcaagcagtaacagcccggtgaaaccggggaaaaatgtggaactttcagcactgagctccacaccgggagtaagctatagctggacagggccaaataacttttcgtccacagagcagaacccggtgatcgcaaatgcgaagcctacactgtccggtaaatactttgttacggcaacggcaaatggatgttcatcttctgctcaggtgagtgtatcagtgggtactagtgccgacaggccttatatcatatacccgaaccctacaaatggcagcctgcgcattatagcacaagtgcagaaggaccaggaa

SEQ ID NO: 194897 - DNA, 269 bp, Arabidopsis thaliana landsberg
agtgaggaggcctctattgacgatttaatggagcttgtgcagcaaattgttgcttttcacatgaaggtgaattcctaaactaataggcttgagattagcacctctgcgatttatttatttctaaaggatttcatttactccttgcagcataatgcagaaaccgaagctgttgatcttttaatggatgttgaggatcttgatctcttacttgagcatgtagacaaaacaaatttcaagaggacatgcaactatctcacaagtgcagctag

SEQ ID NO: 194898 - DNA, 345 bp, Arabidopsis thaliana landsberg
gtaccactcggtggaatgaggagttgatagataaggtaatagctttggaagacagaaatctaataaaggctattagaccatctttagtgggggtcagtgatagtataacttggatttattcaaaagatggtagctactctgtcaaatctggctattatgcagttcgtagaagaggaattgagcaagacgctactgtgaacagccaacacactcattttctttttaagtacatttggaatgtggacgtccctccaaaacttaagcatttttggtggcgctccttgcataatggcttgcctgttgcagataatatgaagaaacgaggcctacgggtagatgccatcc

SEQ ID NO: 194899 - DNA, 367 bp, Arabidopsis thaliana landsberg
taattactaattccattcataccggccattaccgaagcttcgtgaaacggctatcgaacattcgtagaatgactaacgtgagttcgtccattttacaaaaaatcgttttggaggcgatgtaatttgcatcctgtcagcggttatataggactgtacgcacgggagaaaacgggaggtgcgtccccggatccttcacccccaaaaacagcaggcacacaaaccatttacatcaccgcggcgcaaaaaaaagctgctccgcacaaaccataattttatggcaacacaacaaaacaacgtgctcacgcacgcaatgagtggaatgatcggcaaccaagtggtaatccgcaaccgcggggaaaaactggtg

SEQ ID NO: 194900 - DNA, 337 bp, Arabidopsis thaliana landsberg
attcgccactttgatcatcataagtccatggtatcgccaccgcacttttacgttccgccggtggagagcggcggcaaacgatgattcgtctccgcctttctgcgccgtgtgtctacaagaggcggaggaaggagagaagatgaggcgattaacgatttgccgtcactgtttccacgcggattgcatagatacatggctcagtgaaatgtccaagtgtccgttgtgtagagctcagattcctccgttaccgccggcaagtcctatgctcttactgttttttccggcgggtgtgattgatttattcagcaagaaagaatctcgacgcgtagctctctag

SEQ ID NO: 194901 - DNA, 152 bp, Arabidopsis thaliana landsberg
atggttatgaaggctggggagcaccaggaggataaggagggggaatgttttgtccggtttggacatggcggtggcctgactccttccggtataaccgttaaggttaggacgtgcgaggaaggaaagagattcggcattcgggtctcgcgatg

SEQ ID NO: 194902 - DNA, 1164 bp, Arabidopsis thaliana landsberg
atggagaccggtacaagcgtaagcaacatcaaccaaagcatcagaaacgatagctatgaagcaatcaagaatggatcatggtttaatcagttccgcaacggctgcaatccctggatggctagatatgtatacggtctgatattcctgatcgcgaatctactagcttgggctgctcgtgattatgctcggggtgccttaagaaaagtgacaagtatgtgccattagaatcatgttttaagtataactaagtaattcgttgtcttataagtttgatcatattgcaggattcaagaactgtaaaggtggcgaaaactgtttggggaccgacggtgtcttaagagttagcttgggatgttttgtatcctttcttgattcagttgttattacaactttatatgattttttgagtcactaaatcagaaaatgttttgagcttaaccgttatatcctcagttgttctactttgttatgtttctttcaacacttggtacgtcgaagacgcattcatcaagagatagatggcattctggatggtggtttgttaagctcatcatgtggcctgccttaaccatcattcccttcttgcttccttcttccattattcacctttacggttagtcttccatgaaagtagtcttcctctaataatcatgtggcctgctttaaccatacgtcttttttctttggtttgattttgcaggagagattgcccattttggtgcagggtaagactttgattgactagtccaacttcacaatgtatatatgatgtgaaaaatcccaaatcttatattgttgtttttttctctatagggtatttctcttaatacagctaattagtgtgatcagtttcattcaatggctcaacgaatgctatcagtcccaaaaagatgcagaaagatggttagattctttcaaattcgaatcataatatatttttagtttttatttcagtttatactaagtaagcaatactctattctgttttgtagccgtgtctatgtgatgttactatcaactacttcatacacagtttgcatagtaggagtgattttgatgtacatttggtacgcgcctgattcttcatgtcttctcaatatattctttataacatggactttgttcctcatccaactcatgacaagcatcgctctccatcctaaa

SEQ ID NO: 194903 - DNA, 183 bp, Arabidopsis thaliana landsberg
atggaggatgatggatcttctgaggaacctaatgaagacacaatagccattcgtaagctagcagaagacaatagtcaagaattatatccgggttgtcaaaactactcaaagctacgtttcctagttcgtttgcttcacatcaaacttcttggaggatggacagatagaagttttgatttgttg

SEQ ID NO: 194904 - DNA, 387 bp, Arabidopsis thaliana landsberg
aggttttggattgtctactaataatgaaattttttatgcttgtaaaggagatgaccatagtataatgatatactaccctagctcagctggtggaggcatgaaagaattgtttcgtaaggtactgcttctttctgcagaacttgacttcctgtgaattgaacttggtctaatattattttaattttcttggtacattactgaagttggctcgttcactacctaatgtctttctgcagatattggttcttctcggattgaacattttagtttcaaatgattgtaataatttgtggcacatttctgtggttagcaatatttctttctgacccaatgtttttgttttaggttgggaatcgatcaagtgagtttcatcctgatgtcagaaga

SEQ ID NO: 194905 - DNA, 504 bp, Arabidopsis thaliana landsberg
atggaatgggaagtgaagcaaatggatgtaaagaatgctttcttgcatggggatctcacagagactgtttatatgcttcaacctgctggctttgtggacaagaacaatcccactcatgtctgtcatttacacaaagctttatgtgggcttaaacaagctcctcgtgcttggtttgacaaatttagcaattatctgcttgagtttggtttttgctgcagtattaaagatccttctctattcatttacatcaaagggagtgatcttatactcctacttctctatgttgatgatatggtgttgacaggaaacaacttagaggatttgaacactcacttccgtatgaaagatctcgggcaaatgcactattttctgggtatacaagctcactttcatgagaatggcctctttctctctcagcaaaaatatgctgaagaccttctcactgttgcagctatggatgaatgctccccaatgcctactccactgccatttcaacttcataag

SEQ ID NO: 194906 - DNA, 174 bp, Arabidopsis thaliana landsberg
atgcatgtaagttgtaactaattaaccattaatttgtcattattgtttattaataactttaatttctaagcatagttctcgtggagcggattctgagattgcaaccaaatgtgaagaggctctacctcctcgtaagagcatccgacaagaagtctgcggaacaacggttacacc

SEQ ID NO: 194907 - DNA, 933 bp, Arabidopsis thaliana landsberg
gtacttaatcaaaattcatttctgttgctgcagctccttcgttggtcctccagatgtgaagagcactggttaagatatttattgatcggatgtgaaagagcggtatgttcttcttttcctttgcattatgcacttattctcttgctgaaataaaagagtaatatatggtttatcaagatctgtgacataactatgactaaacaaagatcagatttttctaagcaattatctacttgaatttagatcaactacttaaaaagatagtggggcattccgagaatcgaactcgggacctctcgcacccaaagcgagaatcataccactagaccaaatgccctgttgtttgtttaaatcccattgaagcattgcattgttgtaatcctgtggaaaagagaattcatgcttgacttttgtattacaggaaattcactcttgatgcctttttttttacctttgagagttctattcgtgatgaagcaggcaagatgcagtaagttcaaatttttctttaatttatttttgaatatgatattagaatgttttcttgtttagatcatctaagacagaaattactttttagatctgggctatatcagttgactttcagccatcagggcttattagtaaaggtggatagtctggaaatttagaattgatgaaatgttagctggcgtttagaactttggtttccaaaaagtcaaaggggcattccaagaatcgaactcgggacctctcgcacccaaagcgagaatcataccactagaccaaatgccctgcttattataattgttcagttaatgcattctattagcattctctcctttctcttagagatttgttgcttccctctgcatttccattacatacttaatcacaattcgtttgctgtttctgcagctattctttgtgaatccaacagcttacaaaacatga

SEQ ID NO: 194908 - DNA, 116 bp, Arabidopsis thaliana landsberg
atgctctccaagacgagcgccaaactgttcagccgccccacggaagacagtggcttcctacgcggatgctcgtcgtcagaaagatcacatccgccataccgattaaaaagggatcg

SEQ ID NO: 194909 - DNA, 82 bp, Arabidopsis thaliana landsberg
agaaccagagtatgcacataagctttcgtgtaaaacatcggatatttggttgaggagcgaaataggggaaagcaaacgataa

SEQ ID NO: 194910 - DNA, 336 bp, Arabidopsis thaliana landsberg
gaattaaagttgaagggagagtgggatgggccttcagatattgaaagagctctatggagttgtactgtgcgtgcaaagtcacagccagagaagagctcttccgggaagaaaagaaaacggtaggtgataatatttctatccagttcaccttccatccattgttaagatcaaccatatgtcagcagctcttctggaagtcatatccgtaattgttcaactgtagtaagtgttctcgaatgttttatcaaaatgctgagtatttagcggaatcatataacttgaagggaaaaaatggatactttacattttcagatatcttccaaattaacattgaag

SEQ ID NO: 194911 - DNA, 140 bp, Arabidopsis thaliana landsberg
atgaattctgcaggtaagcaatgacttgttcgttgttagtgaatagtgatgatcgacagcgtcaagagtccatccccatcgatgtattaattttgcgcaaaaatttgcagatgaatttgcagattgcaatgcctaagtga

SEQ ID NO: 194912 - DNA, 92 bp, Arabidopsis thaliana landsberg
ataacaggttttagcgtctatcaacgttttacgcacgtaatagatcggtttttgtccttcgtgatcttctcttaccaagacgccgtgtacag

SEQ ID NO: 194913 - DNA, 109 bp, Arabidopsis thaliana landsberg
gcaaattgatgtctccgacgatcggaaacagagcacaggagaggacacgtggaagactgacgttcagtggcgggtttctattgtttccaaaagcgcgcgaagaagataa

SEQ ID NO: 194914 - DNA, 196 bp, Arabidopsis thaliana landsberg
atgaagatcagtttggctggtcacacgttcgatcagcttaatcggtcggttaacgtagaacgtatgtgtggttcaggattccaatttggtttaagaattgagctggtttggagctgattgggtttctatgtgtgaagatgggccgtggagttcttgttcagcccaagctcaaccggaattgttgaagctgttataa

SEQ ID NO: 194915 - DNA, 63 bp, Arabidopsis thaliana landsberg
gtcctcgctatcggccagaataccctgttcctcgagaaattcatcgacggtctacttcgatga

SEQ ID NO: 194916 - DNA, 105 bp, Arabidopsis thaliana landsberg
tttttatcgtcctttcctttggccttgcattatttggacgcactaagcttatgccatctacatcatattccaatctctacatgccatacaaagaagtatttatag

SEQ ID NO: 194917 - DNA, 54 bp, Arabidopsis thaliana landsberg
gtcaatatccagagcgacccaatgattcccgttgacaaagaggaaggcatatag

SEQ ID NO: 194918 - DNA, 109 bp, Arabidopsis thaliana landsberg
atgtatattgaagatcatattgcggtcaaaccacgagtcggtcttaagcttttgcttcgagttgagcatgcatgcatctctcggtttaccctaaaggtgcaaagagaaa

SEQ ID NO: 194919 - DNA, 94 bp, Arabidopsis thaliana landsberg
actcaagtttgttgacccgacgatgaaagaaaccaatatggagaatcttccaactgcaaatgagaataacatggcatcatcaatttcaatacag

SEQ ID NO: 194920 - DNA, 480 bp, Arabidopsis thaliana landsberg
atgctcacattgtcacctatgcttgttggttatttgggtgctgatgttgatccaacagataccagtaacaaaacttatagtgtgcttcatcagcgttgtgcatgtcacattattaacttgatagtgaagtgtggcttgaaaaggcttaaggattatttagatgtgtttaggactgctattaatttcttaaactcttctaaccagagaattggttcatttagtaattactgcaaagcaaaaggttgtagacctagaaaatttggtttagacatggatgttagatggaattcaacttatcttatgctaaaacatctcttgccatataagtctgtgttttctgtgttcattaatacacactatggctatcctctactgaatgaacaacattggtatgtagctgaaaaggttttggagttccttgagctgttttatgaatcaaccgttgtcctgtctggtgtttattaccccaccagtcctttg

SEQ ID NO: 194921 - DNA, 173 bp, Arabidopsis thaliana landsberg
aatactttttattaggtactggcataagtaaggatgagatttcgtctgtgattctcatccagggtagagagagagcgttggaggttatcggttctcttttcaatcgagagaaaagctttttaagctttcttatcggctttgccaagagaaacgtttctaacagattttggtga

SEQ ID NO: 194922 - DNA, 518 bp, Arabidopsis thaliana landsberg
atacattagtgggcaaactcaatggtttggatatgggagcagaatcattgtggttacaaatgataagcacttcttgactgctcatgggattgatcatatttatgaagtcagtttcccaactgatgtgcatgcttgtcagatgttatgtcaatctgcattcaagcaaaactatgctcctaaaggttttgaggatcttgtagttgatgtagtaagacatgcgggcagttttcctttgggtcttaatcttttgggtaaatatttgcggaggagggatatggaatactggatggatatgctgccaaggcttgagaatggtctacgtatagacggtaaaattgaaaaaatactaagaatcagctatgatgggttagagagtgaagatcaagagatatttcgtcatatcgcatgtcttttcaatcatatgaaagtcacaaccatcaagtccttgctggcagatagtgatgttagttttgcactggaaaacctagctgataagtccctcattcatgtcagacaag

SEQ ID NO: 194923 - DNA, 361 bp, Arabidopsis thaliana landsberg
ttcgctcgtagtcagaccaccggcaaaacaaccgtcacctccacgtcagcgacaacctcgttcacctccacgtcagcaagatcctccttcacctccacgtcagcagcaacagcctcttacccctccacgtcagaaggctcctcccaacttcaccccctcaagagcggtccccatatcattcacctccaagccgccacatgtcaccaccgaccccaccaaaggctgcgacaccacctccgccaccgcctcgatcgtcatacacgtccccaccatctcccaaggaagttcaagaagccttaccaccgcgaaaaccgaactcaccaccgagtccagctcattcaagtcggtctacaacatctga

SEQ ID NO: 194924 - DNA, 511 bp, Arabidopsis thaliana landsberg
tcctacacaacataacatccataaggccaccattacagtccaaacaacaaacaacaagaatcttattaaggcttttgatattatcagtctcactaaatattcgagaacacaccggaaaccccaaaagatacaaacgagtaagtggttacctacttttacctgacaaatcatacccagtaccgccccattcagaaggtcgggcatgtgtcatgtgcatgccctgaggtggtttcatcatgaaatgagctccaccacccaatgcactactagtaatagtatgatgctcatcgtttggatttcttccggaagattccatatcgggatggtagcccaaacaaagattctgtaccagaaggagaaggtaacatgtttctacttcccgaagcatcatctcctttcgcaccatttcttccatccttctttttctctagctgaaacgtgccaagaaccacctgtacgggaaaccaaagccaagagcacaaagactatccctatcaaacttggcaaataa

SEQ ID NO: 194925 - DNA, 321 bp, Arabidopsis thaliana landsberg
atgttcgacatgtcctcgctcagcagcaggtggtcggtgttccagatcgacgcgaacatgggcactcccgcggccatggtcaagatgttggtgcagtctcgccccgggcgcgtcgaggtcctgcccgcgctgccgtcggcatgggcagcgtccggttacctccacggcgccggcgcccggcccggcatgaagatcgacgtcgactgggcgaacggcgccgccaccatgatcaggctgaccggccgcccgggtacgatcaccaccgtcgtcgccgggtcctggagccggcaggtgacgcttcccgatagcggaaccctcgag

SEQ ID NO: 194926 - DNA, 1115 bp, Arabidopsis thaliana landsberg
tcgaaattcgacaagattccaccttagcaggagacgatgtctatatcgtggcccaacaggccacacaagtgtattatctcccatatgcgtgtcaaacgaaagaacatcttaagggttgggatgttgtgtataaggtatcgccgcatgggaggttacctgttcctaacgatgaagattacaacttagacccggacacatatgatggagagttcttccaagaagatgggctagaagggcgatttgagatagacttaacagaagctatcggaatggacgtagatattgaaatggttgttgatgaggaggatgatgaggtgcaaaatgataatgacttagtaatccttgaaggcaatgacattaatgacgaacttgtgccttcagatggtgttgagattgaaatggttgatagtgatgatgacacttatgatccggctaaccccaacacatatgaagattatttttattcgttgtaatgaaatattttttatttcgtacctatttctaaatacatattttttatatgtgcttatttgcttactcttaattgcaagttgttggacaaagatggtgggcggtgggatgaggacatggaggggaggagaagcactcgtaggatggtgtaggaggcacaacaggacgaagaagcccagcagcaagtggagcagcatgccgctatcgatgcggtgtagcaggacgacgacgaccagcagcaggacgcctcgggttctggcgcctcaggttcgaggagcatctacctgcgaggtcccgcgagtctccctcagcgtcccatatttcgggacaggcgaccgctgattcggccggatggggagaggtatgtaactttatgttcttcattcttgttcatattatgtgttcaaaatcataatataaactaatactttttatttatcacttggacaggtcttggacggttgtggattatgctggggggtcatcattgcctccccaattgcattcctctgtgcagggaacacttccctggagtggttgagtacgccagagtgacgggcccagcctacaccttcaaccactacgccatcgcccccgatgcagtagaccgggacagccggaaattcaataacaaggcggagcgg

SEQ ID NO: 194927 - DNA, 146 bp, Arabidopsis thaliana landsberg
atttgtgcgccttaaccgctgcgaccattcagaccctatggtttgaaacgggtggttgcgtccatgatattcaaaccgagaaggttgtccaatggtttcaacagtttgcgacacagttattgttagatacatcaaagaaactataa

SEQ ID NO: 194928 - DNA, 815 bp, Arabidopsis thaliana landsberg
atgaaacaagattctgtcaagaaagagatagatgataagggaagggttttggtttcaccaaaaatgaaagctaaacagttatctaccagagaagatggaactgatgatgatgatgatgatgatgttccgatatccaagagattcaaatcagattcctccaacagtaacacatcatctgcaaagccaaaagcagtaaaactaaattctacttcatcagctgcaaagccaaaagcgagaaatgtcgtttctcctaggtccagagcaatgaccaaaaacactaagaaagtaacgaaggactcaaaatattccacgtcttcaaaatcatcaccttcctctggagatgggcaaaagaaatggactactttggtgcacaacggtgtaatatttccaccgccatacaagcctcatggcattaagattttgtacaaggggaaacctgttgacctaactattgaacaagaagaggttgtcctctccatccacgtcctcaatcttactgataaatgttatatacccgtttcttaattgatttttcgtccatctcaatatctagagtgctttcgtatgacattccaagaaagcattattatccatgctgatgctatgttgatgatatacaggttgcgactatgtttgcagtgatgagagagacagattattatactaaacctcaatttcgggagaatttctggaatgactggcgaagactgcttggcaagaaacatgtgatacagaagttggatgattgtgactttactcccatatatgagtggcatttggaagagaaagagaagaagaaacaaatgagcacaaag

SEQ ID NO: 194929 - DNA, 188 bp, Arabidopsis thaliana landsberg
aggagtgccctacaattggacggtctggaaactttaagaaataccaatgccctcctggtcactacaatgatctagctagccttattttcaacacaaatgatgatgccatcaaaaaccttttcagcaaaaacactgacttcgagtttccccactttttcggttctcgtattttttgtcacctagaataa

SEQ ID NO: 194930 - DNA, 1461 bp, Arabidopsis thaliana landsberg
atggcttcttccgatgatccagctccggagaacaaccacgtctccgtcttagctagacaagctcgaaacccaccgacacattttttctttcctcacaatccttctcctcgtacttactacttctcggcgccaccacagatttatttcatctccgacatatatctccctcctcctccatcaatatgggtgtattatcctctttggtatattaaccctaaccctaatgtatatgagtctacacaagaacttcctcaacgttactctccaaaccctagccaagagatgactcttccaccgactagtagtagaagagtttttggccggagaagttacgaactatgtgagaaggtgacatggaggacaagtatcaagccggaagttgaatccaacggtgatcacatcacaaccgtcatgcttcgcaatataccgaaccgatacacgtgcgtatataattccttcattttaaattcataaccactagattatacagtatatgttagtatttaaacaaggtgtgatttaatttatttattttgttgtggtggtgaaatgatgaggcatatattgaagctaatgattaacaatatttgcaggagagagatgatgattcagttcatggataagcattgcgaagaagccaataaaagtgggaaaaatgaagagtttacaatctctgcttatgattttatttaccttccgatagactttaggtaagttttaatctttattattattcgttaattagtttcatctttgtttatatacaacgaaatgatgctatatatacaaatcataatcgataatcattgaatatctgcatgttacaacttacaaatttttattttgtgcattaatgtatttgtaatataagtatatataacaatgttactattcatcttgatattattaacttgatcatatataaattacctaaatgaattaaacaggactacaatgaacaaagggtatgctttcgtgaacttcacaaatgcaaaagcagtgtccaagtttaaggctgcttgcaacaacaagccgtggtgccatttctactcaaaaaaagaacttgagattacttatgctagaattcaggctagttccactcctttacatatatatatacacatctttgatctgtgtatcttatcttattcaatcttattgtaacacttgtcggggaaaacaacaatacttttgtgtagggcaaagatgagctggtgaaacgtttccagcatatgacatatccggaggaggcctacagtgcggtatgtttcagcccagctcgtagcggagggaaagatacagttcaaaccacaatggtcggtaaatgcaatgaaccagtgtgctcggtttagtctttccatatatgtaattaggattatgaataataaaagtgtatgcgatggtgaacatgggtctaggatggaaaagaaaagactcagacaccgaaccaaatccaagtaa

SEQ ID NO: 194931 - DNA, 1051 bp, Arabidopsis thaliana landsberg
atgagctacatggatccatgggacaatgatagttctatgccttttggaaccttcttgattggtaggggagaggagccactgagacgatcacattcaatgacaacaaggaaacagggaaaccatctggctcaaggatttacagtaggatataaaaatggtggaaacattaatactttcaacggacatggtatacttcctggaactagccctgtaaagagctccaaaagaatgggtttcaataaggattttcctttgcttagaggtgaagagagaaatggaggcccagacgttgtaagaatctcatctcctggtcgaagtcctactgctcagagcttgtcagttgctaatccagccttgattatcggggaaggttggacatcggctctggcagaggttcccaatgttattgagaagagtggtggtgctgaatcccatgctaatgtgggtaattcggctaccttaactggaccagcttgtcgtaacatggctgaagcattggtgcaggctccaggaagaactggtacaccaccccaggtattttttgtatctttgtattgctaatagtacactaccttttttgttttttctaacagatttttgtatttggggtctgtaaaggcacaaacacttgaggaccgagctattaggcaatctaggcagttgataccggttgtgccttcagcaccaaagggctcagtaagttttttccgtagttgatcttattttctgtcagttaccttgggctacattgagtatatgttggttgacttctcaggttcataactcttctgataaatccaagaccaaaccaatgtttcgaagtggtgaaaccggtcttgcttcttcaagaaatacccaacagcagtcctctgtgatgctcggtaatatgcagtctaatcctggtagtcagatcaagcctgatacgactaagaagctggtgattctcaaacctgctagggaaaatggggtagttgctggaggttcaccacccaacagccgagttgccgctagccagccgaccactgccccatccacacaatttactgcttct

SEQ ID NO: 194932 - DNA, 554 bp, Arabidopsis thaliana landsberg
atggcaacaacccggaaactggtagtagaagtagtagacgcaaaggatcttacaccaaaagacggtcatggaacgtcaagtccgtacgttgtcctcgactattacgggcaaagaagacggacacgaaccatagtacgtgacttaaaccctgtttggaacgagacactcgagttcagtctcgcaaagcgaccatctcatcagctctttaccgatgttcttgagctcgacatgtaccatgacaagaactttggacaaacccggaggaacaattttcttggtaggatccgacttgggtccgatcagtttgttggtcaaggagaagaggctttgatatattatcctttggagaagaaaagtttgtttaatcttgtgcaagtgagattgggcttagggtttactacgccgatgaaaagcttcctcctttgaaaccggcgttagctactcttgagacggtgttggcggaaaaggcgcaggagacgacggcagaagctcgagacgagtcgtctcagcaaccaccagagattaatgacagattgacagtccagctgaattga

SEQ ID NO: 194933 - DNA, 234 bp, Arabidopsis thaliana landsberg
atggaaaatatcactcgaacggccacccggaacgcccattgcccggtgcactccggacttgccatgacggcgatggcatacagcaaaagggccggcgttgccggcccttttgctgacgcaacccgcttgtcaatgctcatcagcctcgagcaattgcgcgtaatcatccggtcccagcaacttgtcgaaatcggcgacatcgtccggcttcacgacaaacaaccacccttcgcc

SEQ ID NO: 194934 - DNA, 126 bp, Arabidopsis thaliana landsberg
atgtacgtgcttatgaatcccatcttaccatctgagaggagcaccgatgcagtgaatttatttctgtccaccattgaaaaactatctgacttgcagttttctgatgaagatttcaatcagcttttt

SEQ ID NO: 194935 - DNA, 461 bp, Arabidopsis thaliana landsberg
  unsure (1)..(461): unsure at all n locations
cnagtcacaattcttaagcaaagccagcgaagttgtcaagagacaagaaggtgaaatatatgcacttcagagagctcttgaggagaaggaagaagaattagagatttctaaggctacgaagaaacttgaacaagaaaagcttagagaaacagaagccaacttgaagaaacagacagaagagtggctgatagcccaggatgaagtgaataagcttaaagaggaaaccgtgaaacgtttaggagaagccaatgaaaccatggaggacttcatgaaagtgaaaaagcttctgactgatgtaagattcgagcttatttcttctcgggaagctttggtattttccagggagcaaatggaagaaaaagagctactattggaaaaacaattggaggaactcgaggaacagaggaaaagtgtgttgtcatatatgcaaagcttgagggatgcgcacactgaagttgaaa

SEQ ID NO: 194936 - DNA, 1207 bp, Arabidopsis thaliana landsberg
gtccagtatactacaaaggtctctaccatctcttctaccaatataacaccaaaggtgcggtttggggtaatattatatgggcccattcggtttctaaagacttggttaactgggaggctcttgaaccggctcttagtccttcaaaatggttcgacatcggaggtacatggtccggttcaataacaatcgtaccgggaaaaggaccgattatcctctataccggtgttaaccagaacgaaactcagttgcaaaactatgcaatcccagaggacccatcagacccatacctaaggaaatggattaaaccggacgataacccgattgcaatcccagactatacaatgaacggttcagcattccgtgacccgacaaccgcttggttctccaaagacgggcattggagaaccgtggtagggtcaaaaagaaagcgtagaggaattgcttacatctacagaagccgagatttcaagcattgggtcaaagctaagcacccggttcactctaaacagtcaaccggtatgtgggaatgtcctgatttcttcccggtttccttaaccgatttccgaaacggtttggacttggattacgtcggtccaaacaccaagcatgtgttgaaggttagcttggacattacccggtacgagtattacacgcttggtaaatacgatcttaagaaggaccggtacataccggacggtaatactcccgatggttgggagggtttaagattcgattacggtaatttctacgcttccaagacattctttgactacaaaaagaacagaagaatcttatggggttgggctaatgaatctgacaccgttgaagatgatattttgaagggttgggctggtcttcaggtatctagctaattaatttaaaacccatacctttgttaatataatgaaattttatgttaaattatgtaatgaatttataggtgattccaagaacggtgctccttgattcaagcaagaagcaacttgtgttttggcctgttgaagagatagagtcattaagaggtaactacgtccgaatgaacaatcatgacatcaagatgggtcaacgcatagaagtcaaaggaatcactcctgctcaagccgatgtggaagtaacgttctatgttggaagtctagagaaagctgagatattcgatccgagtttcacgtggaaaccattgccctcccgtaacattaaaggctcgaat

SEQ ID NO: 194937 - DNA, 195 bp, Arabidopsis thaliana landsberg
tgttcaaacaagaaatctatcaatactcaaggagaagtagaagaagacgaatgtagtccaagaagatatgtagatctttcgagccgtggactatgtctaatgccgatctcagcttcatatcccgtggctgcagctgcggcttcggctgcagagatgaacgtacatctggtttctggcatcttccattctgtgtaa

SEQ ID NO: 194938 - DNA, 123 bp, Arabidopsis thaliana landsberg
cccataacgcagtggtcttctccgtccatccacctgaagcccacaattgattatggagatcatcatccgaaatcttcaaccaaatcatttcaacacaaggccctcaaccccgaaattcgatga

SEQ ID NO: 194939 - DNA, 219 bp, Arabidopsis thaliana landsberg
atggctgaagccttcccaaaccaagaccctatgatgtttggtgaggagtcacctctcggttcttccaccgatggttttgatccacaaacgcctgacagttatccacctatccgagctcctgtttacccagatgatttacgaaaaggtgcttttgggatttcttcctctcatttgagtaccgctaagcgcaatatagccttcatggaagaccctcagtct

SEQ ID NO: 194940 - DNA, 426 bp, Arabidopsis thaliana landsberg
atgggccgacctctccatttcggcccaccaggaacccatcctccacgcgcgcggggacccgtggcttccacatccactgacgggcgggacccactcgtcagcaagctcgcgccgcgccgcattcgctgtcgcatggggcccacacctcagctcgctgcctacctcgctaaccacctcagccgcgtcgtccgccgcgaatctgccccgtcgtgcggccaccagggatcgggttggtgctcccaacagcgtataaagggtcccaggaacctacctccgcctccgtgtgccgttaactacccacctcgcctgcaccgttgggaattttgtgccgccgtggggggaaaacgggccgccaccgcggttctggccgtctgtgccgtagagggcgctcggttgttcagggagtatcgcgggatctcggcgggc

SEQ ID NO: 194941 - DNA, 272 bp, Arabidopsis thaliana landsberg
atgcagatttacgaggtggcaccatcgcttttcatggtagacgtaagaaaagctgctggtgaaactcttgaatatcacaaggtttataaatatatatccaataacaatagtttcatcattactgtgttgcggattagagtgatatcttgttttgtggtatcgcagttctacaagaagctatgttcgaaactggaaaacataatatggagggcaacagaaggaataccaaagtcagagattctcagaacaatcacgttttgatcccaacttaa

SEQ ID NO: 194942 - DNA, 108 bp, Arabidopsis thaliana landsberg
aaaatcaaaggggttcgagatcgtttaaatgtcatcgttgatcagcttggaggagagcgttttcatcgaacgatggctatcaatgttcaagaaagcattagacagtaa

SEQ ID NO: 194943 - DNA, 105 bp, Arabidopsis thaliana landsberg
ccgtcgctcttgtgttctcggacggttcggatggtatttttggctctgcggctgttacccccaacgtcacggtgttttctcgctcccgcactttcgggtgcgtgg

SEQ ID NO: 194944 - DNA, 100 bp, Arabidopsis thaliana landsberg
atggcgactgataaaattggagagaaagatcagaaaaatggagagaaaaatcggaaaaaagaaaaagaagaagaagaagatgcaactttttctctgctga

SEQ ID NO: 194945 - DNA, 212 bp, Arabidopsis thaliana landsberg
acatgcaaaagttagcacaattccgaaccaacaccgtactgatgaagagcttactacttatagccgtactacatttcatgagcgttcttttgctgcaaaaaccaagagatggttagagaacggtacctctaggaaaaatgcgctacttattctcgttcttgttggtacgtgcatggtgataggcgatggaatccttactcccgccatttcgg

SEQ ID NO: 194946 - DNA, 771 bp, Arabidopsis thaliana landsberg
aaagcacagggaaaatctcaacccacatccaagttccatggatttacttcagtagacatcagcaggttcaggtacagcagtgatggtgcaagtttcctctgttttagcctttcgatgttcccctgcgtgaaagagttaattctaatcaacctaaacattaaagtgatcccagatgacgtgtgcggcttgaaattcctagagaaactggactggagtggcaatgattttgagactttaccagaaaccatgaatcaacttcccaggttgaaatatgccagctttcgtaactgttgcagactcaaagcattgccagcgctggttcagttggagacaatcaaactctctggctgtataaacctccaatcattgttggaactttcttatgctgaacaagactgtggcagattccaatggcttgagctttgggttgatggctgcaagagcattcgatcaattttagatcagcttagacattttatcaagctatcatatttagatcttagcagccatgaatttgagaaattgccatccagcatcgaagtgctttcctctttgagaactctctgccttaataagtgcaagaaactcaaatcgattgaagggcttccgttgtgcctcaagtctctctacgcccatggctgtgaaatcttggaaactgtttcccttcctttgaaccattctgtaaaacaccttgatcttagtcattgtttcggtttaaaacgggatgaacatctgatcgctcagtttctcaacgagggagaaaacgaagag

SEQ ID NO: 194947 - DNA, 507 bp, Arabidopsis thaliana landsberg
gttcagacatcaacagagggagcagtagcaccctcgacgtcgtctccacattcgtcggaatctggcccggcctcggacggcgacgcgggcggaaggatctccacctcgaaggaggaagccagcaccaagctcaggccatcatagccaaggcctccttaagggtctcggcccgggcagacacctcgaccggccgctccgtagcctcagccagctgtcccccgaggacatcagcccggctcatggcctcagcagcctgactccggggttggtccgccagcggacgacctgtccaggttccagccgccgctgctgcacctcctcggccagggaggcacgtgctcccgggccaacgaagcctcttctcgagccgactccgcctctgtccgcgctgacaccgctgcctacggtccggctcatcgcagagcagccgagggttctttaactgagcaagagaagcttgcgtggcgaggccgacgagccgagggactcgacacgacagcacaatga

SEQ ID NO: 194948 - DNA, 421 bp, Arabidopsis thaliana landsberg
atgatggtagccttcggcttcatggcagcagcaaggtgcgtatatattgtatatactagatatatttgattatattcttcttgattaagtcattctaaatatttgattacacatgctttatttaaatatcttataatcatcttcatatttttattttattttgtaataatgttttgtaatagtgtaagagtttcaaacgagatcgggagtgggaattctaatggagccaaatttgcaacaatggttgtggtttcgacatcactttcgataggaatcatcttcttctttatcttcctgtttttaagagaaagggtttcatacatttttacaacaagtgaagctgttgccacacaagtagccgatctttctccactcttggccttctccattctcttgaacagtattcaaccagttctctctg

SEQ ID NO: 194949 - DNA, 463 bp, Arabidopsis thaliana landsberg
ttatttccaatgccaaaaaatacctttttagcagatattcttgttgctatacttagtgaagatgcaagtcttattaactttagagatgaaggaaggacttgtctttcttttggagcatccttagggtattatgaagggttttgctatctgttagacaaggctctagacagtgtttatgtcagtgatgatgatgggtcctttccaattcatatggccgtgaagtatggttatgtcaaaattctcaaggcaattcttaaacgttgtccagacgcacttgagttacttgacagagaaaatcaaaatgttcttcatgttgcggcaaagaatggaaaaatcgaagtcctcaaatttattttaagatgttgtaaggataagaacaaggaaaagttgattaatgaagaagatgcaaatggaaacacgccattgcatttggccaccaaaaactggcaccctaaagttgaag

SEQ ID NO: 194950 - DNA, 400 bp, Arabidopsis thaliana landsberg
atgctggcactcgacgaagagatgaaagaagggctggttggtgaaatggctggtgttgcgcttggggaggcggtggatgaagatgatgaggatgtggcatcttccgtcgctgggtattcagccctaggaacgtgaggtgtcgatgtgccactcctttccctgtcttctgttgatacgttctgagagcttgcgctaattccctcgatagaactggtatcaggctggctggggactcagcctgtcgttgcgttgaactcggcagggcagaccattggggccaggaacagcttcgtggggtcatcgatttcacaatacggcatcttttctgtcgatgttggcacgacggattcctgaggcttctcaatttcctggggctttgcagattcatcctctggactgg

SEQ ID NO: 194951 - DNA, 273 bp, Arabidopsis thaliana landsberg
ggagaagagagcggagagacgcgtagagagaagccatttcttgtctccttcgtttctcaatttctttatgtactaacttctccatgttttcttcgttattacaaactctcggcgttttactacgccttcttttcttctcctgaaaattattcatctagaagtcgttatacgttaattattttgaacaacgattcttcttgtaattatgattataataatgatgatgatgatgagacagaaggatctgatcttgtgctctgggatttgctctag

SEQ ID NO: 194952 - DNA, 98 bp, Arabidopsis thaliana landsberg
ttacggagagtcgaagaacaataccattgaaaaatgagaaacaagagctcaagaaactactcaaccatattaataaacccgcaataaaaagtttccaa

SEQ ID NO: 194953 - DNA, 121 bp, Arabidopsis thaliana landsberg
atgggcgtgtcaaaaagatggcagatccttatgcagatgtacaaagacagcacgtctatgtctcctccacatatttgtcttcccatgaaagcagaagccatcttgccactatcagggccag

SEQ ID NO: 194954 - DNA, 499 bp, Arabidopsis thaliana landsberg
gattctagcatctactgatacagattacaaaagatacttggttaagtactttggtgtgaccagacccacatactttggtttggtgaatactcctgtgggaatcactggaattataatggttgcttttatgttaattgcattcacattagccagtagaagatgcaggcggaacttaactaagttgccgaagccatttgacaaactaaccggatataatgccttctggtattcacatcacttacttctaactgtttacgtccttttagtcatccacggtgtttccctctatctcgagcataaatggtaccgcaaaacggtacattccataaactctttaccattttactttttgcatgcttacataattggctgtggtaacaataacatatactgcatcctacaggtatggatgtatcttgctgtaccagttttactctatgttggtgagaggatctttagatttttccgttccaggctttacacagtcgaaatctgtaag

SEQ ID NO: 194955 - DNA, 90 bp, Arabidopsis thaliana landsberg
gagggacctcatcggggagaaacgatcttggattgcttttacatcgacaggtcatccaaagctcctctaaacgacgtagagttgaaggag

SEQ ID NO: 194956 - DNA, 297 bp, Arabidopsis thaliana landsberg
attgtacttcctctggctttgcatccgttacctccgattgtacttcctccggcgttaaatccgcttctatttccggaatttctccggttagtttgggctcagtttggagttgtggttccggaatcggattttgctcggtttcggactcagctggtgccgctccattttgtaattgaggctcttcaacagtatccgccattagagaagctgaaaaaagatcgcagtatgttacaatccgagactgatcacaaaataaatcaagtctcccaagaggaagaagatgaagaagagatctga

SEQ ID NO: 194957 - DNA, 201 bp, Arabidopsis thaliana landsberg
gctcatggtttaacacttgacatcattcgggcactggcagttagtggtgtcttggtaaacatctataaacctaactttggtttcaatatatatggtttggtcttggttttttcctcggttgactcaaaaacccaatttccaggtctacatcggttcgttctctattggaatgggtgcaatcccatgggttataatgtctga

SEQ ID NO: 194958 - DNA, 1581 bp, Arabidopsis thaliana landsberg
atgaattcggatgatggcataacgacaggaacacaaatcactaaactacatgtttcgtttcttaaatttgatgtcatgcgatcaaaaagttatcatttggtacaagaaacttcaccttactatatcaaaagattatcatcaaccagtgagcatttatagaggagtcaatgttgcactaagtggaggagacggtgcttcaccttttcgtacagggttttgaggcaatctttgggatagatgcaaggaaagtaattggaagaatcttcgatgcatcacaaatactcgagcgtccatcataaattttctgaaacatctttctattcccttcggatgatcgcgatcgttaataatagaactagtgatacaatttagattaataataataatttctaattacctacttaaatactatcaatgcatttcttctatatcgaaattttttcaaatatttttatttgagagtttttaattaatttttatttaatcaatcaaactttacttgatacatgtgtattttgtaattggtccattgtttaacaaaaaaataactttttcgcaatacataaaacatccattttcattcagcatgctttatatccaaattatatgtaaactcttctgctgacctaattcgtgtgcacacgtggatttattttgtttaaagaaggatcatttgaagattatacaatttgaccaaaaaaaaaagaagattacacaattatgtgggaggagattcacaaatgctggaatttaataatgaatcttgtttgattgaggacaaaaaaaactttaagaagtaaatatcgatggatatcttttgatttttactgatttgaatgaatcttttttccccccaaaagtatttttttttttaaataatgacattgccttaatattttaccaaattaattgttacaatcttttaacttctgagacagtgagacgtgtgagcttatcaaataacgtagagtactagatatatgtgacaaattttagattaagagataaaaataatgatattcagctgtgatatattatatatatatggtaattatctgttatcctcaacagctacttataactacagaatccattatttctatatcaaaacttttaaaagattttttatttatctttttacatttttagttacctttttattttcttttaatcaatcaaacgttacgtacgtgtttaaattttagtaaaattggtaccacacattgacacatcacagatgtaatcattggtccattaagggaggattaggctataaattggagatcaatgtcaccatgagatgacatattttctttgtcaaagatccttagaaaacttttattcattttgatatatcatattcaatcctccaaaattatcaacaaacaagcaatccatttcatctgtttctttcatatgtccaatttagttacgtgttactaaaaaacagtttaactcgaattccattttattcaaacctgattctcctatatatccacaaatatgaagttggtggttctcttctcgttcttgctcatgttttcattgtgttcttcaggtaatctcaagttaaataaataa

SEQ ID NO: 194959 - DNA, 56 bp, Arabidopsis thaliana landsberg
gcaaaatcggcaaagcattgtgttcacgtttctctaatttgctaattgaattaaag

SEQ ID NO: 194960 - DNA, 97 bp, Arabidopsis thaliana landsberg
atggtagcacgtcggggcatatttcgttacggagatatcgtcatccctcgctatcaccgtcaccgtcacagacgtagatctgctgattatgaagagg

SEQ ID NO: 194961 - DNA, 1597 bp, Arabidopsis thaliana landsberg
atggaaaaccttgacctcaacattgctctcgacatcgcagcacgtggtggtcgtgattcagttgctgatcttgctagcatgctatcatcctctacgtattatcgcttcctctctgcccactctgatgtgctgaaaactgtttctctgcaaccttttatcgaaaatgctgcccgttggaatcttctctccaccgctcggcctatctttgcccgatgcctcgaagattcttatccttcaggtgtgtaccttgagagcctccgtctggctgcaagcaagggtcgagcagaggaaggatttcacatgttacgctttttgcaagcagcacagccaaccagcttcccacatgcagccatgttcacgttgtctctatttgagaatgttttaggtatttatgatgatggcatatcatcttcccacggttttgttgacttcgttggatctgatgctgcagctgatactgtagcaacctctgtttattgccatttactctaaattagccctcttaagaggcgcgggagtagtgacacctggaggtttggtgatatccctccatgtattgctgacgcatgcgctatcgacaatcgttgtaagacttgttttctttactagtatcagtcatgtaccttatcctttgctagaatcgtaatgtatctattgttctcttttttcattttaatgtatttgtaaagccttaatctttatttccctgtctcactagttgcttatgacttttatctttcaatgtttaatatctgtacttgtttcattttgtcttccacgcggctgcaacttctgtcagtccatgtcccacaatttaagtcaagctcctgacagatgggctgctgtctttccctagcttccccctactacacgcctttaccgcaccctcacttacccatttactatgccacctacaccattcaatttgtgactaatctcgaagctattctaaaactgtgccatctacatcatttattgccccacgcttttgttcctcacgctaccttcctatttattcctctagctccctttaaactctatatactatgcttgtaaaccactattaattcctctagctccctttaaacaactatgacttacattccacaacccatcctcgccaatatcgtccgccgtgttggtagatttggttttcgttatctcggacctttcattgctgcaggtccattttggcaagccacagctctctcacccgaagtcttgtctgatgttgatattgatgagtatgttttcaacagtcgcctggctaatgaaggttcaccatttcgtcccttcctgcttcgatgtttgcaagaaggtcaccacactgctcagtatgttgaaggtctccgacgtttggttcaagagccccctacgcaacgtcgctagacatgcttagcactgcaggcccacattccatgtatgctcgatttctttcgcaatcttcctcctctgttgcgggtcttcggatcaaggtttcttggttcttgagacttttctcaataaggtttcaagttttgaggaagcacttgagattgcaaacctcgttgaagctcagattcgtgcgatgggtagccgtggcactcgacagtactag

SEQ ID NO: 194962 - DNA, 1518 bp, Arabidopsis thaliana landsberg
atggcgccgaagaaagcttcagcgactggggctgcagctctgcaaccactggatcacaatcaggagacagtttccttgcgggaggcccgaagccagaaaaggaaggctgtcagtccgacaccaccagaggacgagatagatcaagaaattcgagatatggagatgcttcatcaacaagtacagagaaagaaagaaaagatggccaggctagctgaactgcagaggcagattgacgaagcctctgaagaagttcgtcatcttgctcaggatgagcaacaccgaaggcctcagcaccaagaccttcattaggagggttttcccaacgaagatgactggtatgacaatttccatcatgggaattttgcttttgatgatgcttctcctctgtccgctgagctgcaggctacaccttggcctccgtcatacaagccgccccagcttcccgtattcgatggccactcagacccgaagcagtttttgatgagctacgaagcaacagtatcttcgtatggtggcaatgcttcagtcatggccaaatctttcgttatggctgtcaggagtgtggctcaaacctggtattcctcccttcgaccaggaacgatcacttcatggcagaagctgaaggatttgttgttaactagcttccaaggatttcagacgaagccggtcactgctcaggctctgttccagtgcacccaagatcacgaagaataccttcaggcgtatgtccgaaggttcttgcgtttgagggcgcaggcaccaacggtgcccaatgaaattgtcatcgaagccatgatcaaggggcttcgtcctggacctgctgctcaatactttgctaggaagcctcctcagaccctggagaagctgctccaaaagatggacgagtacattcgtgctgacaatgactttcgtcaaagaagggaggaggccttcagattttctgaaatgaccaggggcttcggaggaagatcctatccgaggcatgtcaggtccatccacaactccactcagaatgatgataaggggagtcagcagaacagaccgcagtgctcctcacaggcttcggcccaacagcaaagctccttccgaccaccagctccaagaggcagaggcgccaggggcttcggcggaagatttggagatcaaccaagaagaatcttttgcttattttgcggtgagaacaaaggccataccaccaggatgtgccatgttaccatccagaagcaaaagaaaatagccgaagccgcagcacaacaagctcagccgaagcaggtcatgcatactgcttcgtatcattcgccctacatcccagaatatgtgggcaaccaccctgcagtttctgttgcttcggcgagtcaacctcaagcttcctggcaacagcctccgcctccacctccgctgcaacagggccagcagccagaagggagccagtatgctccacaccagagggacttcagagagcagtccgaagctcgtacagtcaatagcactgtgccagagtcaaagcacatctattga

SEQ ID NO: 194963 - DNA, 890 bp, Arabidopsis thaliana landsberg
atgtgttctgatacatggagtgttactaaaacgaggacccgaatttactttgctaaagaaggtatacaagttcatcaagagattgcacagaaaccaaaaaaatgtgggccatttctcgtcagttatgttccaagtttggttcaaattcagtcaggtaataaacagagtagctgaaaaatattcattgcctttttttttataagtattatcctttacttttcaaatacgttgtttatgactgcttaatgaggtatctattctcttggcaactcttttttattaatacagtatgtgtaagcatatgaataccgaaagcaaaaagagtagaaagcaaatcagcgaaagtgcatatctcaactccctaaagttgtgacatattgtaattgtatctccaacacaaacacaaacatctgtgtatatgtaaccatatatgttcatgttgtttcatgaaattacatagactttcttttgttccagcatagtcgatattatcaggaaagtcatcgaggttatatgcattaggatcaagtacacaccaagtgttgggctgtcttgtcaaagacttgtccttgcctttacccgagaagtcaagcacatatttcggtctcccatcaaactctaagatcccccaatacctccggcgctatactcttggcatcctcatagacaaggctgaaaagttaaaaatccatgatcactcctttcctcgcaggcgttccatttccagacatagcatgctttaccatcccctgattgaatctctttgcactctttacattagcgttcttgtctccatccgtacgccatatatccgtaggctcgtttccaacagctatgtacttgattttgatcttggatcatacataacacatgaaggaagttggctttaa

SEQ ID NO: 194964 - DNA, 261 bp, Arabidopsis thaliana landsberg
atgcgttttcagaacacgttctcccggggcccttccagccacagtcgcatccgccaatcggtccagccgtgtcgcggaaggttgtttaaccagttcaaagtttcctgcagggaaacggaggtcagcgcaatatgagtgaatcccaatctcaggggtccccgtccgcgtccgtctatcagacgtacagcgacaacacctatctgttcgggggcaatgctccgtacgtcaaggagatgtacgagaactacctcgccaatcccg

SEQ ID NO: 194965 - DNA, 64 bp, Arabidopsis thaliana landsberg
atggacatggacctcgccgaggtcggcccaaggagctcatgtgcgaccaagggggaaaacaggg

SEQ ID NO: 194966 - DNA, 150 bp, Arabidopsis thaliana landsberg
atgatacatccgagatgtatcagtcgagctggacctccgcgagggagcgccggacccctgtacgcacaacccgaacccccgattgtggcccaagactcccgagtaagcgtaccaggtcccttggatggggaccagatccctccgaggaag

SEQ ID NO: 194967 - DNA, 754 bp, Arabidopsis thaliana landsberg
ccacaaagaaggaggagccgcgctggctaaaagaaaacgacacaaagaaaaaagagaaactataaagagaagagaggaagagaagcctctcacggcgccggcgaagccgatcatcggagaggcaaaaggcgtttggaaaaggggtatggtttacgtcggcgactatatagacagaactgaatgctatatttattaattggtagagtcggttgatttgaccccaattattaacgttagtgattttccacgctcctgttatctccttttctcttttttactaatgctatcaggtgcttctatttatccccaatattgcaatttctccatcggcaattttttacacgtgttcgtcgtcttcattctctctaattctcttattctgattggctaaaggatcagcgatctcagtctgagagagccatctctacgatcaggttagcttaaattcattatctctctctctctctatttcactccgtcgttgatgattcatatatgttagggtcttcttctagggttcatcgattctcttttcattgttctatgactctgtttttctgttttttgcgtgtcacagaactcgcatgtagtgactcttctggggtccaagcaagtaaggacgaagactctccaggatcctttaattttattctatggtaagagagttttgttactttagattgattttgagatttgattttgattcgctgggacttaatatcttcttttgttcttcaggtatagggttctttga

SEQ ID NO: 194968 - DNA, 254 bp, Arabidopsis thaliana landsberg
atggcatccacccaaactgacaaaaatcaaagtcaaaatcaagaatcaaacgtaagtatgatctatcctttcatccattcattagctagtgtaattctcggaatatttcatggcatcgttgttttttttttattttgtttttttttgagttttttgattgaatacatgttttgatttgttttctcgattagaaaatcatttggtcaaacgagaccacatttgcgttacttcaacgggttattgtggagaaataa

SEQ ID NO: 194969 - DNA, 238 bp, Arabidopsis thaliana landsberg
atgtccatccgatcgaagctgctgaccctggccgcggccctgctgctggccagccaggccggcgccgccgagcgcctgaccctgcgcatcggcgaccagaagggcaacatgcgcgcccagctggaagccgcaggcgcattgcgcgacctgccgtacgacatccactgggccgagttccccgcagccgcaccgctggccgaggcgctcaatgccggggcgatcgatgccggcatcatcg

SEQ ID NO: 194970 - DNA, 252 bp, Arabidopsis thaliana landsberg
aatgggtcacggttccacgcccccctcctccgaggcaacaggcagcgacgcctcagccatctcagcatcggcggcgacgggtggctccacgaccagaacggcaacggcctcagaggaagccggtgccagcgccgacaatacgtctggtgggcccaaggccacagccgcgccagcagcctccccggcgcgacggccgcctcaacagaggagtcggcctcgggagctagccccactgcaactggtaccgcctga

SEQ ID NO: 194971 - DNA, 558 bp, Arabidopsis thaliana landsberg
atgatgaaagtcatcgtaccattcatcatcattgattgggctttcttgacgaagctccctgtattggggcctttagtcttggccatcctgagtgaggtgacgcatttcttcagcagcttcatcgatcttcctttgaagatcagctagtcgcgccatcttctccttcttcctttgtacgtgctgatggatgatttccatgtccctgatttcttggtccgactcctcctcctagagtgttggactggtggccttcctcttctggcttcgagcttctcgaagagaaagagtttcctggtttgggtctagtggctgcaatgaagtagcccctggtgctgaagctttctccggcggcatgacaaaggtcggtgcttgccgaaggtggtcgaaagagtttgtggttgtgggttcgagccctacggtgggcgctaatgttggggacttgttctcaaatgctttgaattaagaacaaggcaacacagaattttaaatgttaatgctcttcgtccttcgaagcattattccccttaggatataatgatcttcagacgaaggttttga

SEQ ID NO: 194972 - DNA, 336 bp, Arabidopsis thaliana landsberg
atggatgttgctgaatgtaaacacgcgcaggacagtatcttccacactcgcaacgggccgggtatagaacaggttgttcgagctataatacttttcttccggattggcagacggcgcagacgcgttatacaaaaagctctgctcgacttccgcgtacggatcgactgtcgagttcttgaacttccagaacgcgtccagctgtgcttcgttcgcggacgccgggtactggattgcgccgccccagaattcatcctgtggaaaagtcgccagatcaaatcgcgtgacgacgcggggggggttctgtccgcccttgagagcgcacaaccgaggcgcgtt

SEQ ID NO: 194973 - DNA, 162 bp, Arabidopsis thaliana landsberg
atgaaggcgtacgccggcgaagaggtctctggttgcacggagaccagttcgcagccgcgccacatcgaccgccccggggtcgccacgtggccagggaaagggacgtgctctaggatacacgcggtggatctggacctactgcaaggaaagcgccgggccccc

SEQ ID NO: 194974 - DNA, 200 bp, Arabidopsis thaliana landsberg
ggtcatcacaatccgacgccatcactactaatccgtcaccgtcaccaccgtcagattcggatctatgcaacggcgtattcgtttcatacactcacactaaaggatctaagatcccacccaacgacaccgcaaatcaaccctaccggttcgaatctgtgataacagtgctcaaccacggccgcgacgagctcaaatcatga

SEQ ID NO: 194975 - DNA, 281 bp, Arabidopsis thaliana landsberg
tcactgcatcagggacccacctaagaacctccaagagctctatcagctgtttgaaaagtatgccagatccgaagagctccaccagcgcaaggtcgagtcccagaggaaacccaaggaccctccacagtccaaccgaacatggacaagaccttcgcagtccgactccggtcgggacagccgcagccagcagcaggtgcatatcattgccaaccagcacctcgccggcgaggcccctcgacgtcaagattatcccccccagggccgcggcaatgtcactcgtg

SEQ ID NO: 194976 - DNA, 48 bp, Arabidopsis thaliana landsberg
atgaaagcagggcagagattaggcatagctgtagccattgaagcagag

SEQ ID NO: 194977 - DNA, 427 bp, Arabidopsis thaliana landsberg
atggtcagcacggcagcgaccgcgatgtcaccggtaagcggcagtccatatgcgatcacggtaagcggcgcagcagcggataactatacgatcagctatgtaccgggaacactgacgatcagcaagtcggcagagacgctcacgtttacgccgatcgcggcgaagacgtatggcgatgcggactttacgatcacagccacgagtaccaacaacagtatcccggtgacttacagcagctcaaacacggcggtagcgacggtatcgggcaatacggtacatattacgggagtaggcgctacgacgatcacggccagccaggcgggcgatgcgaaccatacggcggctacagatgcacagcagacactgaacgtcagtgcctcgggcagcacggtgctcacgtttgcaccgatcgcggcgaagacgtacg

SEQ ID NO: 194978 - DNA, 212 bp, Arabidopsis thaliana landsberg
gacaaacacacaagataaatatgctaatgaatccatcagtcgagtcttggaagcctttaagcaattggaagcaaaagatattatggcgactatcgctaatatattgactttgatccaacagaaccatcccaaagctcgtatgaatttgagaacattgctagatattgcggtggaaattaaaaaagtcacaaagcataacattgaggaggagg

SEQ ID NO: 194979 - DNA, 1463 bp, Arabidopsis thaliana landsberg
actcccaacgacgtgatctcttttgcagcatactataatacaaacaaaaaggttaagacacgaaaatacaagcaaaagggtaagcatcctataatactaacaacaaaggtaagccaacctaaataaaaagggttaatcctatgggttaatctacctaaactctagcaagtgactgaaccaatttcctaacagctttttgcgacacatttactcgataaaacattgaaaactatggtttcccgtagcatcataaccatgctctcataccaccttgtaacacccctatcccgctatataaatataaacgaaatagaagcgttacgtagacgcccgcagtcggccaaccaaggtttccgaaatgaattcgtatgcccgagtcgtccaaccacaagagtctagcctcccgcccgtggcctaagtcttttcaacccgtaaggggtttggcttctaaggttttctcccgcgagctaggcgttttctagtggatttttgggtctgaggaacaaatggagtatttttagggtcttaagtcggtcacaagatcggccaaaacaagcacgaggtcgcccagaccaatcaaaactcgataaatgtcactccacgggcgctccgggacactaatcggtctccgattggtttcctccattttttatggataaacatcatccaaaatgcataagctcgaccctaaaaggataaggatgaccggaaatatggataagcttgagcctttacggataaacatgaggcacggttcaatcctggccgtccatttcttcattccggcgaaacctacgatctgtcaccagaccgcaagaacattaatacggcacactccgttccaatgtctcttgagggtccatgacgcaaattaaggtttccttaggactataacacgttccatgccataattaaccgagtaagccagctatcgtcacttatccgcattctccgatcaatcccgtgaccattcacgacccatacacatatctcactgtccaaatggattcccctcgaccttctaatggtttgtcgcattgtagctaaacttggtccgtctcatggtgagtcattcctttacgcatggacttgatccaattcaatgcttcttacccatgacttgccacactaaatggccgaactgatcttgcatttttttggcttgatctcgcattctactcgacagactgtacgtccggccacatagtcaaggtcaggggcattacaccatctcttggaaaagagaagatcgagacaaccatctctgacaacatggttgcgatgaaaaggcatatgacaacatccatagagtaaataattatactacaaaagactgtaccgatatcaagaggcatcttgctgagctacggacaattggtgacctcgcaaaacctcgacgtcggagagttcgtgaaaatttaccacgaagaaaaggcggaagtcaaaaattcatcactagctaa

SEQ ID NO: 194980 - DNA, 1094 bp, Arabidopsis thaliana landsberg
atgttgaaagtgaagaattttcttggttctagattaaagtctttccctacaagaaaaggttcgttttcttcttctgtgctctacttttactcaagaaaatatcaaaaaaaaaaattgaatgatttgtttctcttcttctcttaacttcttcaatcttgaatatttttctacaaagaacgtttaaatgttttaacttctgaaatttatacatttgttctctaattaaccagagatagtttttcttcattgttagaaaaacagaaaaagattgtaaaatatctgctaaattgttgttttgtcaatggagcaggaaagtccgacaaggaatgttgtcgtagcttgacgtcgaagctaagtgttaatgaagagtacaaggaagcatttagaacaaactcctacttagagactcggacaaaagcagaagatcaattaggcataacatcatgtagcaaactctcttcttcttctccttctccttcttcatcttcagatcttagcttccattcacacttcaccgattacttgcttgaccctccacaagaaacacttgatgccctgatgcaagactcgagtttagacaatcttatagttacgtttttcgacttgagctccgaagcttgtgacgtgtgtgagactcttcttcagtgcctccaacaaatcaagattaatcacaacaaaatcaaaagggttatgaagattgggaaaagggtttgtaacggtgctaaaaccttggaatgtagccccgagatgctctgtgctttgatatttcaagaactttcgagatttgccgcgctgaaaaaccctttgtgtcgtatcgtcaatgaagcacagtttcgtatagttcacgatgcaaactcggatttgctcaccaaactgacatcgaaaaagagaagaataagaagaaaaatcaggttctttaaattctgcaagaagctaggaggttatagcctagtgattactcatagcgcgattgtcattacattgctgatcatagctcttcacagcatactcggcgttttcgcagctcctgcgttgctcggtctatgttcgttctgtcttttgaggaagaagaaagcgaaaggaagaatgcataa

SEQ ID NO: 194981 - DNA, 257 bp, Arabidopsis thaliana landsberg
atggacgttacccggttccggcgaagaaagcgagaggtatcatcatctcccaaccatttatcgccatgctgccaaaagttttgttctaaaattaatcatacatctaaaccggagtaatatattcatttatcaatagaagataaaaacaagaaaacaactataacctttccgcaacaacccaaaaagcagacgtgagaaacaatgcgataagatttatatatgattgatgacttttctttctattttagtacttttaa

SEQ ID NO: 194982 - DNA, 179 bp, Arabidopsis thaliana landsberg
gctctgaccgtaccgataccagctcggtacgctcacctcacacttacccgctttgctgctacgcctatgccagtgctgcgactattagcaggacgccacaccacagaacacgcacgcttctaggctgcagagcctgcaagtctgaagagacccggtcgtccgctcgatactctgtctag

SEQ ID NO: 194983 - DNA, 851 bp, Arabidopsis thaliana landsberg
atatgctttagagttgagactacaaaaaaaaagcacaatattgtttttaaagtgacagagagagtcagagaaagagatctaatggcgaagaaagaagagagtgtgaagcttctagggttttggataagcccttttagtcgtagagtcgagatggctctcaaacttaaaggcgtaccatacgagtacttggaagaagacttacccaaaaagagcactttacttcttgaactaaatccggttcacaagaaggttccggttcttgttcacaatgataaattattatccgagtcacttgtgatcctcaaatacatcgaccaaacttggaatagcaatccagttctacctcacgatccctacgagaaggccatggttcggttctgggccaagttcgttgatgagcaggtactctagtctaactaattaaattgatttataatattgattgcaaaataaatgagaaacacttgagagttattagaagttcattacatttcaagcatttatatcaggattatttgtaggataaagtaattttctaagtacttttttttatagattggtataataacttgcagatcctaccagttggcttcatgcccctagtaaaagcagagaagggaatagatgttgctattgaggagattcgagaaatgcttatgtttcttgagaaggaagtcactggaaaagatttctttggtggcaagacgatcggattcttggacatggttgcgggaagtatgatcccgttttgtcttgctcgggcttgggaatgtttggggattgatatgaccccagagcccacgtttccagaattaagcagatggatcaagaacttgaatgaagttgagatc

SEQ ID NO: 194984 - DNA, 1001 bp, Arabidopsis thaliana landsberg
gtcgcagtccaactataaaaacaggggagcttaagtttggtgaggtctccatattatccaactcatactcggtcctgagtggagatgaggatgtggaggagggaaataagatcccagaggcgggtgaagaaactaagaaagacgaccctggtacagaagttccaactgtgaagatgacagtatctcaagaccatgttcatgtacgtacggaggtgcagaaccaacgtctgtctcttccacgtggatccaaaactgctcacaaggttttatcaaactcttttactcaatcgaataggaattttcctaaagatcagagtaagaagcaccctcctaaaaatcattaatgtcggaattcttatggaatgttcgaggtctaaataagttagaaaaacattccgtaataaagagttgggtggagagacaagattttctgtttggttgtttattagagacgcgagtaaaggaggataaagctcaggtgttaagtagtaagttgttcaatgattggtcgatgattacaaacttcgaatacaatagtcgaggtcgtatttgggtagtatggaggagaaatgtgcgtttgagtcctttctataagagtgaacagctcataacctgttcagtaaagctagagaaccgggatgatgagtttttttgttcgtttgtgtatgcatccaatttcagggatgatagaaaggttctttggaatgaattgcaggatcattatgattctcctatcattaagaagaagccttggattatttttggagattttaatgagacgttagaactagaagagcattcaaaagtggaggataatcctgtggtttcaatgggcatgcgtgactttagatcgatggtgaattattgttctcttacggacatggctcatcatggtccactttacacatggtcaaacaaaagagaacatgatctcattgccaagaagttggacagggtcatggtgaatgatgtttggactcagagttttcctcaatcttata

SEQ ID NO: 194985 - DNA, 227 bp, Arabidopsis thaliana landsberg
acttgcaaattcaacttgtaaagacgggatttataaaggaaaatgtctgggttattgaaacagtacgaggaaagggtaaatcaaaggctaggggtgaccacgaaaggaagaaggatgacccgaggaacaaagattcaatggtggaagtgaaggcgacgatgatccagagaaagagattgggagaagttttgtttgttttgattgattacctttctgaaaagggacta

SEQ ID NO: 194986 - DNA, 399 bp, Arabidopsis thaliana landsberg
  unsure (1)..(399): unsure at all n locations
atgcagaaatttcagaacgaatttggctccggttttcctgctgcatgggatgctcccggtgtggtggatgcagatggcttttacctgagaaacggacaggaagcttattatcctaccaattataatttcggccctaaaatggatggacgtgaaattttgtggtatgacagcgtaatgcgaccttatacaccacaaccaggcaatattaaggatctttacagaacaggctatacaaacgatatcaatatttcattacagggtggcggatctatnnnnnnnnnnnnnnnnnnnnnnnnncggaaagattacgagggaatatttgaaggatttaaactgcatgatgataatttcatgttcaacggcaataacagaattacaaacagggttcattttaagtta

SEQ ID NO: 194987 - DNA, 111 bp, Arabidopsis thaliana landsberg
atgcatattaaccctagaaacgacgtcaccggagccaagactctgcaacgtggcagctacgctggaaatctcatctccgacaccaattccgatcacgtccttggaaccatg

SEQ ID NO: 194988 - DNA, 97 bp, Arabidopsis thaliana landsberg
atatcgatgatgacgatgatgatgatgatgcgagatgttccaagagaactcattgccgtgttggcaaaaataaaggttcaagtttcaagtttcgacg

SEQ ID NO: 194989 - DNA, 352 bp, Arabidopsis thaliana landsberg
atgggtctcgcatgcagcgctgtagcacatgcggccttatcgcgctgccatgcactgttgcatgggcgtgttcgctgtgtggtgaagagacacaaccggagcatcaggacgcaggaaaacagcgcctggcgtgtgctgccatgcattgcggcatggaaagttcgtgtgctgccgagtcacaaccaggatgcagggatgcgcgcgaccgacacagctgcaatgttcgaggcacacgcgcgctccctttcacaaacttcctggtgcagtgacgtgtcctggagcagatgcatcaaaaggacacggcgaatccgagctgctacagccacgtggctgcagctcttttccccgaccc

SEQ ID NO: 194990 - DNA, 309 bp, Arabidopsis thaliana landsberg
cgcggcccggtgccgccggtggtgatttattcggcgcgcgagctgacccgcgaggaagacctgcgcctgcgcgaatacaccgacagcatcgtcatcaagggcgcgcagacgccggggcgcctgctcgacgaggtgtcgctgttcctgcacgccgtgaagaagccgtcgagcccgacgtcgaccgcacagacgcctttggatctggccgagcgcacggtgctagtccgtgacgacgacatgcgcaatgtgctagcattgtcgaagacgctgcggggtcagggcttgaaagtgcacgttgctcattactga

SEQ ID NO: 194991 - DNA, 486 bp, Arabidopsis thaliana landsberg
atgctgcaaggcagtggtcttgcctaccggaaggtcagcggcaccacggtcgtcatcacgcgctcacaggcaagtgccgggcccgggagccatacctcctccacccgcccggcaacgaccacgtcgccggcagcaccgggggtgacggaactgtcgaccttgacggtgaccgggacacggattcgtggtggcactacggcatcaccggtcatcacgattggcagcgagcagatccgggcggaaggtttcacggatcttggcgaggtgatacgcagcatcccccagaacttctctggggggcagaatccgggattggcggcgggcacatctcaggggggacccagagatcaaaacgtcaccggcggctcaggcatgaatctgcgcgggctgggaccagatgcgaccttgactctgctcaatggccaccgcatggcctacggcgggttctcccacgctgtggatgtcagtgccatcccgaaggagaag

SEQ ID NO: 194992 - DNA, 198 bp, Arabidopsis thaliana landsberg
ggtccctcccgggagcgagatccaggcgccgcggcgacttctgccgcccctgcgcacgcgcggaccgtccggcctatagacgcggaccgtccggccgtcagacaggaaaccctagtcctgcgccaggtcgcggaccgtccgcgcatgtgcagagagcaccgccgtcggttcttgttgagtgtttggcgcccgaaaaag

SEQ ID NO: 194993 - DNA, 118 bp, Arabidopsis thaliana landsberg
acagagactcttcacgaccatctttaacccaacacgtcttaccaatggagaaggttctcctcttggaactctcgttttttacatcgaacttgtcagcaccagacaccttcaccgataa

SEQ ID NO: 194994 - DNA, 602 bp, Arabidopsis thaliana landsberg
gggaggacagttttctaattaattactttcttgctagacatgatattcaagtcggactgaagaaaaaatataatgatacctacaagtcatctaaaagtcttcttggagggagtgaatggtattgccaacaggcctatcgtgcgctaaatcaagctgcaggtgcaatgtcataacttgcattctgtcacttggttcttccagtcaatagtcatactgtaacaggttattctgtcatggtatattgatgtacaggacgatgtatccggcataggtttgattatggtgccatcatattcctaggtaattataagatttccctagtcaacttgattaaaacattttgttcaattcagatatgatagctctgaggttgtcttgttttggtgtccagatgagcgatacaaagatcaaagtaacagagcgtctatttcaaaatggctaaggcagtctatcaaagtgtatgataattttgaagcatctatggaaggcatgagatcttttttcaacagtgtccaggttcaaaacaatctcattcccctccttaaaactttattacatatcattagaattctctgaatatcgcatgcaggagcaagttgaca

SEQ ID NO: 194995 - DNA, 257 bp, Arabidopsis thaliana landsberg
caagtgctacatccttaagcgcaactactttgaatgccacaacagtaaacgcgaccacgctgaacggaacgataggcaccggggcacaacccaatatcaccacacttgccggacttaccgcaataacggtaacaggccaggtgaaagcaggtacagtttcggctaccacttttgtgggcgtaacctccctggtgaatattaaaatgtttaccagttctggcacctataccgttcccacagatgtgtatgccatagag

SEQ ID NO: 194996 - DNA, 165 bp, Arabidopsis thaliana landsberg
atctccgctagattaaacggtcctccttcgttcatcatcccactcggatccatcaacttaatcagttacaacacatacgacgaaaccagtaacaacaccgagttgactcagtcgtcgccgattcaaaaccagagagatagagaagagagaaatgattgtggcttg

SEQ ID NO: 194997 - DNA, 63 bp, Arabidopsis thaliana landsberg
ctgcttcagttcatggctcacacagaccaacgaccaactatccacaataaaaagtataaacca

SEQ ID NO: 194998 - DNA, 432 bp, Arabidopsis thaliana landsberg
atggaagaagaagcaaataaagatgtcgaatcttggacagtgttctgcaacggttcctggggaaccttcggggtaggtgcagctgctgtcttggttgcaccttccaaagtcagaacatgctatgcagtaaaacttgatttcagctacacaaataatattgccgaatacgaagccttgcttttggggcttcagaagttaaaggcaatggggataagaagggtggtccttaaaactgattcccaagttatttctggccatgttgacaagagttgtagagcaagagacccgaagcttgagaaatacctggatacagttcgaaggcttgaagcttctttcgaagggttttctgtcaagaatattccacgaggagaaaatgagcacgctgatctgctagccaagtcagcggcacaggggctgccgttactttcggaa

SEQ ID NO: 194999 - DNA, 42 bp, Arabidopsis thaliana landsberg
atgcgacacaacaaacttgtgaagctgtgggaaggaaatctg

SEQ ID NO: 195000 - DNA, 667 bp, Arabidopsis thaliana landsberg
aatcaatctgccaaaggagccaatagccacctgcaagtgctcagaagaacggtaatccagagggaaacccaacaacatgagccaacattcccgattaaaatacagggccctatggttccaagcaccattgtgccgctgaacagtgaaggaggcatcaaggtactgctgcggaccgagaaggacaaggttgtctctttcaagaatgctgctgaactgaaccaaaacttgtcccaggtgcgaccgctggatatcacgcaccccaagttgacggtgctccacaatgtattctctaaccacatccctcaccgccgggatagctatctcatggtcaggtaaaggttggatgctgatgatagcccagtcctcatgtaatggcgggaggcgccgagaaactgacctggccataatttcccggtgaaggaccaccgaagcgctgaagcccggaggaaggaaaggtgcgggatcaacgcgcctaaacgccatcggagcagggggcgagaatcggcaaccagcaggcgaagacggagcaagttggggttttgctgaagtgacgcccagagaaagcgtcagggacggaggaggtgccgattcagatttttttaatacttctctggcgaactcctcgaagctactgaaaatggcggtccaccgcacagagaaacatccg

SEQ ID NO: 195001 - DNA, 81 bp, Arabidopsis thaliana landsberg
gtctttgtctctaagtgcaacggacagcagttggttcacggctataggagagatcctatcgaagtcagaagttttgaatga

SEQ ID NO: 195002 - DNA, 1169 bp, Arabidopsis thaliana landsberg
ctaatctaatggagtggtctgaagaagaaggagagattctacctgatttcgttaatgactactatttcattgatcaaagtgaaaagcttgtcaagttttgtgatttgccactcaaatggaacagtgttgattcggatgatgatagctcaggattgtctgtgtttttgcgtggtaatattgactctggagacgagtcattctctaagcttgttaaaggttggaactttgatctttcttctgttgatgaacatcccaagattgaggttcttctacatgggttgcattggataactctacaaagcccaagaaagagttatgagactttgattagaacaagtctggttactcttcagtttcttcactttgttaaaaggaatccggatgttgcaagtggtaatgtgtggagtagtttacagaaagttgatgggtatgatttggaatagtatgttatatgttgtgttgttgtttttatgtcatatttgaaatcatgtataagttatatagtttatttaggatccagccttctgaggatgacgtaatagatcatgttaatttactctgtgaagctatgaaaagagatgaagatttgacaaaatcaaaggtctgtttttttctttggtctctcttatcttcgttggaaaggattgtttattacatatttcttgtgcgtttggttctaatgactgaaatatatgactatgagtctgattccttagcttctaatacttttgtttcatttttgctctttgtgtgtttcagatttgagagtcttcttctattgagtggctacttgagaattcagaacacatattagtttagaaggaatcaaattaatcagaaaagcaactctcatttgtatattcactgcttctccttgatgatttattgtgcagtgtttgattacgtttctggggaagacatcacaaacaacacctatcgaagtggtgagacctagttagaagtggtttctttgttctcccccctttcttgctctcttttctagtgagtttaattcttttctttttttttctcttaaggaacttccaacagaccatctacaagatgctcagacaccaatggaacaggactccattgttgagaatatgacagatgaggaaaacagcggcagtagcgatgatgactctgaggcgaacctgcagtttgatcca

SEQ ID NO: 195003 - DNA, 43 bp, Arabidopsis thaliana landsberg
aagctctcactggagcgagaagaaagacgactctgcaactcag

SEQ ID NO: 195004 - DNA, 93 bp, Arabidopsis thaliana landsberg
gctctttggttacacactacgctcagtactgctaccacaccaacgtctgtcattactaccacttggggtcttctaaaccatacggtgtcaacg

SEQ ID NO: 195005 - DNA, 216 bp, Arabidopsis thaliana landsberg
agataagaacgtttgaggtgcttctcagaacatatgaagtgaaggaagtgaaaatggataccagtagcatggttggtgagagccacgaggaggacaatgaaggaatgaggccttgcaagagaaagcaccgttcaaacgaaaacgacactgtttcacaggacaactcttctaatgcttcttcagtcgtcatggctcggccttgtagtgaagcaagag

SEQ ID NO: 195006 - DNA, 2042 bp, Arabidopsis thaliana landsberg
atggcaagatgtgctacaaccaagcataagtcagccaaaaagccgagtgtgaaatttagatcccttgtgtggcaatggaatgagctctacaacacggtttgttttctgttcactttgaaacatattgtgtgtacatgaaatgttttaatccttaataaagacagcaagtggacaacacaaacacattagtatttagggattgaatctacatagaccaaagaaacacacaatagactatatataattagatttagctagaacaaaataggagttacagaaactcgagtgaaattaaattttcagaaataaaacatgatagaaaagaaatactagataaataaatattgaatcctgagaaatcatgagggagttcatataaaaaattaaaaacaagtaaagtaattatagaagcattatgattcgctcttgaatttgaatgacatatatttaatcatcctgctctggtctgttataattaactatgaaatatatttctaaagaattaaactattctttgttttaggaatcattaacaaactttaagatcctaattcaataaactcaaaaaacacaattttcgattgctaaagaagcttctcctagctaataataggtccatcgattcaacactcattctaatgccttggtgaattcgattatagacatagttaaattggtctaattcaactaaagcattaagaataatcaaagattgagaactagaaaaacaatccattaataaaatcacttctaaataaattaaacatccttttgaaattgctaaactcaatgataggattactcacacataatctaagtacatgtgatcattgtagaagaagggatcaagagctcaatagagattgtcaaaggattttaacaatctatataacaaaataatgaaagaagaacaaccttagaaatcgcacaaaatggtctgcctatgcggctataaaatgtttaaatatttttaggcaaatagacagagccttaaacaaaaaaatctctctttttaggaaactagggtttttctcaccttccccgacgccggtgtggcctctcgccgccggtgagcatttttttcttttttcctcctctttttttctcccatggtcttgtatggtggttttttcgttttcgacagatatgcagatgcggctgtcagatctgctcgaggtcattcatcagcagccaccagaacctccagtcccgccggacccccttggatccactgcctccacccatctaccgactggcttccactgtgaacccctccaccttccttccctgtccatttctctggcacatcggtctgggttccgagtcgtctttcgcttatgtttctcgtgttgaaaccattgtgtcatctaatgacatccttatcgcttttatgcgatctattactgcagaatgcaaatctgttatcttggatacaagccttgctatgatctatctttgggagtgtgtgtctcttatggtaaccttagtgtttgtttatctcaagaatcttgttatttgcttggactgtttacgtttgggccttcgttgccattcttattccttcatggagatgtttgttctatcattttctcctttgtgggaaagatgtttgattgcaggtatgaagttcttcttcggtgttgctaggcttgccatctcatctcacggtggcatgggatggtccttcaacatctcctccatctactcttaagttctcctgcttgacggttatatccttagccaaaaggattggtgcttacaagaccttcgaagacaccttgttggacgacgctgctccgtttatgtccttgtaacatacggttttggctctcaagaaagtatttttaaatgcttgttttgcttctttgaagcagtttattttcccagaatttcctctagtgagtggtttggatgatcaagacttgtcagtattgcaaggttctactttccgacatattgtcccatctgcctttgtggtagaatttgtaacctttggggttactatggatgcggttaaggaagcagcagtgaagattctattt

SEQ ID NO: 195007 - DNA, 175 bp, Arabidopsis thaliana landsberg
ggatatggtcttctccacctcgcttgagctcttcctcatctcggatgactccttgatcgagctaactagggatctcgtgctgggattgagctccaattttttcctagtcttcagctatcggtgtctcgttggctacgagagttatgcgagaacgagaattgggagaactaagtaa

SEQ ID NO: 195008 - DNA, 244 bp, Arabidopsis thaliana landsberg
atggcctgtttccacatcggcaacgggttgcctgccggctttgatcgcgtccagccagtcctggtaatgattggtgctgttgtaaaccctttttgccccgggttccagcgtggcggtaactatattggcagggttgctgtcgagaaactccctgcttacatcaatagagcctttttcgccaataaaacgcacggcatatttcctgccaaaatccacatgcttcattactacgccattggcatag

SEQ ID NO: 195009 - DNA, 569 bp, Arabidopsis thaliana landsberg
atgcagggttcttgtctgaccgccatcgtagcaaaatcaaccaaggacctccctacactgaccactcccctactgcccttgcccctttcgggtaaggtagtcttccactagctttcctaattagtcagccaaggcgtcccattaaacccttgtggtggcacgtggttctcaagttaagctctatgttccaattaacattaatgaacttgacatgaacataaatagaataacaagaataattggaacatagatataataaatgattatcccaaaaccatgtaaagtaatagcaaactacccaagtgattcaggggtaaacaaggtaatgagataaacaatctagggtgacctattgggtcccatcaaaattaacctatgcatggataagtgatattaaagaacattattaggtaaaaagtggtcaagggcacaacttgccttcaatgagctcctgctcagctacttcaacctgctgctcaccaggatccccagcaacgtgttcttctactcgccacaatacaaacaagcacagtgtatatagagaaattaacattacatcaaacatatga

SEQ ID NO: 195010 - DNA, 204 bp, Arabidopsis thaliana landsberg
gcgagcacaagcgacaaactcgaacacgctagagcaatcacaacgttcaaggaagaagaaattcgtcaccttgcagaacctgatgacgttgattttgtcctcaccttagacgtgtctgacgtcggggtttcaaggattgtgattgatgttggaagtttgatagatctactattctggagtatgcttggagagaatggaaagtag

SEQ ID NO: 195011 - DNA, 757 bp, Arabidopsis thaliana landsberg
atgggtccaatgttggccacgtggcggacaaagttagactttttgagcaaacgtgggtcccgcaacggtaagaagccttagtaatggcccatcacatggatccatttcccatattctcttcaacatgcgaatccctcataatattttgacccacgacaaaaaaaaaaaggaagatattattttagttttaatactactaaataaaaattattaatatttgtagtataaaatacttccataataaaactgttgcatgttatatgaggtgttaaaaacaaaaaaaaaactattactttttaacaaatatactgaaatcatttacaaagaaagatacattggttcagaatccactaatatcataatgtggtcattaacatacaacttttaaaataaaatttatttcccaaacacggtaagaatgaaatgcccatgcatgatgcattcgtaatctctttcttttacatcaaattttgatagatggaaatcatgagatagtttgtactagaatacgttgataattaatattttttattattattgttttggttataataggttataagatagagtagttttatgtccaaaatatattcggtagcgactcaaagtctaatatatattgggtaatatgttaatgatactcgttagagtagactgtcaagtgagtacacgtaagtgtgatgatgctaacttcgataaacgttacagccgacaagctgttactgcctctttaatgctcacagactcccccaattaa

SEQ ID NO: 195012 - DNA, 352 bp, Arabidopsis thaliana landsberg
atgatcatcgcaaattggtcgcacgtttgcaacaaatgtgtagttgtgaaacagcgatgtcaggtacaactgcctgaatagtcgaagaattgtgaatttgtgagactaaatcttcgtatttcaaaaaagttaatatttgtagtggcaaaatagatatttcatatcacatttttttttttaatccatttcacattttcatatcactgaaaatagtaattctggattatcttactttataaatatgaatgccacatattttagaaatatccgattataaaaacaaaatatcccaaggtaacatattgcgagtatttcgaacaaaaaatgggaaaaacagaaaccagtattaaag

SEQ ID NO: 195013 - DNA, 301 bp, Arabidopsis thaliana landsberg
gtgatggagtctcatcaagctagcaaattggatgcatctggtactgcaaaagctgttatttcttgctttcagaaattaggcgtgtcttacgacatggaccaggtgtttatatcgtactttgttctctagatctatcgttctctagtaagatcatcatctgtaagaccgtttttgcttacttttgaaatcagatacaattaattcgagatcctaagcagcagattgaggtggtgggtgttccagaggagcatgtctcgggtcacgctttccatctttatcacttgacatcaccagataaaac

SEQ ID NO: 195014 - DNA, 485 bp, Arabidopsis thaliana landsberg
atggctcgatttcaattttgctgcgtcttcgtcttggtcgctcttgcggttttggccgtaaaccctagttcaagctatcgatttaccattgtggaaccgaaatcgggttctgattccgatttggactcagattcagagtcgttactttttcatcaggattactctccgcctgctccgccaccgccaccaccgcatggaccgtcggtatcttgtagcgaggatctcggcggcgttgggtttttggatactacttgtaagattgtcgccgatttgaaccttacgcacgatgtgtatatagctgggaaggggaattttatcatcctgcctggtgttaggtttcactgcccgatccctggttgttctatagctatcaatgtttctggaaacttctctttgggagcggaatctacaattgtcgctgggacattggagcttacagctggtaatgctagctttgctaatgggtcggcggtgaacacgacggg

SEQ ID NO: 195015 - DNA, 671 bp, Arabidopsis thaliana landsberg
atggggatttcttttaacaaggacacagattgtaccttgcgagcttatagtgacagtgactatggaggctgtgaaacaacaagcagatcgactggtggattctataccttccttggaaacaatatcatctcctggcagtcacagaaacaaccaacagttgctaaaagttctacagaagcagaatatagagctttgtctgaagcagcttcggaaattacctggctgtgtaagattctgaaagaacttgggattccgctgcatcgaacaccagagctatacggagataacctttcatctgtgtatctcactgcaaatccggctttccacaagaagagcaagcactttgcgaatcactatcactatgttcgggaacaggttgctctgggaactcttcgggtcactcacatctcaaatcaatttcagatcgtagacatcttcaccaaatctctgcctcacggtccgattctcatctcttcagattcaaacttggcgtagatgttccacccactccaagtttgagggggactatcaatggagacaagctagaagaaacaagaatgtttgggaaagagatcgagaagactgaaaaaggtgaagaaaacaaaagacctaattcagcttcagacacaactcaatacggtgtcgttgagtcgctctaccaaatcagatga

SEQ ID NO: 195016 - DNA, 283 bp, Arabidopsis thaliana landsberg
atggattgcctaaccgaattgacccgaaaaccgaaacccatttcaaatatcgccgatcagttcaaagctcacaaccaaacacaaaccaaaatccaaaaatatcggtttgttcggttcggtttgctcggttttcactgtagtctcgtgcctatttgtgtctgtagagctgtcaaaatggtccgtccatagactattgggcgtgtccatgcggacaatttttttttcgactgaagttgggcggtccttaatggacaacggtccaaaaaatgtcaatgcccaataa

SEQ ID NO: 195017 - DNA, 437 bp, Arabidopsis thaliana landsberg
atgcagttgtgtttgacgaagatttcgctttcgaaatgctggtctcaggctgcccagttctcgaaagcttaagtgtaaacaagattaacttgaacgacatttcagaaagtgttcaagtgtcttcgcagtctctattgagcttcagttatgttgcagacgatgatgattatctagaagttgtaattgatgctcctaggcttcactatctaaagctcaatgataaacgaactgcaagttttataatgaaaaatcatggctcccttcttaaggcggatattgattttgtgtttaacttaggttccgaatatatgttcgatccaaattatctaccaacgagacatataattcgtgactttcttgtcggtttatctggtgttaaagatatgatcatctcttcgagtactcttcaggtaaccatcattgaatttactatttga

SEQ ID NO: 195018 - DNA, 257 bp, Arabidopsis thaliana landsberg
atgtttacgatacctaaagaagtaaatcaaagtaaaaaccaccagaagcgcaacgccggagacgccgcagatgatactcgccgcaagaaacacgtgcctcatcacgtgatcacgtctgatcccagctccatctcgccaccaagaatcgtcgtctccgccatctgccgccgtggctttagggaggagctgagggtgagaaggaggagtagaagaagaagaatgagaatctccgaagaaggacttcatttttcccggag

SEQ ID NO: 195019 - DNA, 487 bp, Arabidopsis thaliana landsberg
gtatgtggaatgtacagggtcagccattgtagcgttgactcagtttagtaaacagttcccggagtttagaaagaaagaggttgaaaggtttataactaaaggagtgaaatacattgaggatttgcaaatgaaggatggttcatggtgcggaaactggggagtgtgctttatctatgggaccttatttgccgtaagaggtcttgtggctgcaggaaagactttccataactgtgaacccattcgtcgagcagttcgtttccttctcgacacgcaaaaccaggagggcggctggggagagagctatctctcttgtccaacaaagaaatatagtcctttggtaggaaacaagacaaatgtggtgaatacaggacaagcacttatggttctaattatgagtgatcaaatggagagagatcctttgccggttcatcgtgctgccaaagtgttgattaattcacaattggataatggtgatttcccgcaacag

SEQ ID NO: 195020 - DNA, 424 bp, Arabidopsis thaliana landsberg
atgataatggggagcccgagtcagattgctttggctgaatttcgagtgatttcagatcatattggcactagagacttagtgcaggaatttttggcttttaaagtgttcccaacactgagggagtgggagatgccgaagctagagggagaaaagaagaagggagaacttgttcgattgccttatcactacaagtttaagaaacattttaaagcaccctgccaagagtggttggacacaattgaggttatgtgcaacgagatcctcggcaactactctaagaaagaagatcagttaatgtcagcagccgtcggcactcgtccgaaacgaagattgaatcgggtgctggatgccttgaattttgattaccctgactatgagcaactgggcggagatgccgaaggcccgaaaagaaaaagaattgcca

SEQ ID NO: 195021 - DNA, 161 bp, Arabidopsis thaliana landsberg
agactgctaacaagttggtccatgccactaccacaaatgctagattgttgtcagagaaggtggaagaactcgagaaaatagtgaaacgaggagactcagcagtggcagctgccagaacagttcacgccacggttaaccagaaaggattaccctctaggtga

SEQ ID NO: 195022 - DNA, 73 bp, Arabidopsis thaliana landsberg
atgtcggtagggtttccggtttattcactcacggaggaagaaatcgaagctaatgtggtttcgatcatcggag

SEQ ID NO: 195023 - DNA, 109 bp, Arabidopsis thaliana landsberg
ggacacctgcgtcttgaaccgatacatcttcggtaacctagcctctccgccctcgaccacaagggtagacaggaatatcacctgtgtcatcgactacgccttcggctga

SEQ ID NO: 195024 - DNA, 280 bp, Arabidopsis thaliana landsberg
gatcagctaattatcacgctcgatggtgaaggagacggcttgtcagggtcaatttgtgaatataagaacaaccaagtgaaacgacaccatgtcgtttcagctagagattctataggtacactctatggtcgagtaactgattatctgggaatgagaagaaatgaacatgagtacaaaatcatgggtctcgcaccttatgcgaaagaagattctggccgagttgtactcgataaattcagagagattttatggttgagtaacgattcactggattttagaa

SEQ ID NO: 195025 - DNA, 426 bp, Arabidopsis thaliana landsberg
atggcaactttagatctaaagttagatctagacttcaaaaaaatcactttccattatattcaagttcgatatcggcttgcgtccttttttttaactcgactctcaaaatggtatgggtaaggtaacattacctttccccaattgagtggttagttctatatacgctttcgacagcatatacgattgagtgtgttgtttgttccttctggaatcatgttttgaggtaggcaaccaaatgtgtgaggtaggcttttacgtctaaatttcttcccttgctttaatttttgaaagattcaacgggcctgttttctcctaagctcgaagctagtcaatccaaaccaatatcaggaaaattgtggaccatatatatgtaaccttaatcaagaaaagaatggtaataagcagctagctagtttaatagtctag

SEQ ID NO: 195026 - DNA, 44 bp, Arabidopsis thaliana landsberg
atggttcgggaacaattcatggacgtggctcgtctttttggaag

SEQ ID NO: 195027 - DNA, 393 bp, Arabidopsis thaliana landsberg
tctacaagctaaaacagattttttgggctgaaggacaggaagccttatgggctttaggtttcggcccatataatgaagagaggaaagcccattatgagagaatgctggtgagctgtctatgagtcttatccacagagagactagagttggagagcaccacctaaatcgtaacagtaagaagatgatcatgtgtgggagggagtgagaaacacgcgccgatagagagcgtgtggattagttaggatgagaaaatccgtatcccatcttcaacggggcaaaagaagatccatcggccaatggacttggtttataggatgggggtggtaagtgtgagctactctacttattagcaaactactctctctttgtgctctgtctcagatctctctgtga

SEQ ID NO: 195028 - DNA, 371 bp, Arabidopsis thaliana landsberg
  unsure (1)..(371): unsure at all n locations
gagaagccgggggcttacattccatggaccacttatgaagcggagaatatgcaaacgaacgggacggtactggggcctcggtatactccctttcaggtggagacggcctcatcagggcaacgatgcgtaaggctttcctctgaaggccaatatgttgaatttacttcttctgtaaaagccaacagcatnnnnnnnnnnnnnnnnnnnnnnnncaagcgcagggcgggggcgaacaggctacattggggatctataaaaatggaaggcttataaaacgatcttcagtttcatcacaatattcgaggctttatggattgtacccgttcaccaatgaccctgccgacgggaaaccgagggaattttatgatgaa

SEQ ID NO: 195029 - DNA, 375 bp, Arabidopsis thaliana landsberg
atggttctgcaccatatcgcgcagggcgcctgcctgttcgtaatagccgccacgtcctttcacacctacggtttccgccgcggtaatctgcacatgatctatatagttacggttccagatgggttcaaagagcgcattggcaaaacgcagtgccaggatattttgcacggtttccttacccaggtagtggtcgatgcggtagatctgctcctcatcgaacatggtcgacaggagtttattcagttcgtgggcgctattcaaattatgtccgaaaggtttctcaataacgatgcgggtgcattttgtatcggagcaaatattaagcggtcccagttttttcgcaatatcgggcaccagctggggcgccacggccag

SEQ ID NO: 195030 - DNA, 1640 bp, Arabidopsis thaliana landsberg
  unsure (1)..(1640): unsure at all n locations
atgttggtttgcgaggtgaaggcagcatcgaagtcaggattactcaaattggagaaaccgaatggggcgagaggtgaggtccagaaggcccggagtggactcggtttaaacgttcagatagttaattcaaagactaaaaacagatatatttaaagtagaatgattgtgagtaaataggtattaaatgtattctttgggtataaattgtgggtctaagaccatgtaaagacacacgcatttcttggtgtaaattagctatacacattcttttacaatactcatagtttttttataatcatttatctattttatagtatatttgtcctcaagaataatcctttccactaaataaataaatacttgcgtgtgtgaatccaacatccatattttggagccgtctgtggggacggagggttattgagttgtcagattttctataccgcatttttgagataacaagcaatggccggagaggacgccatcagcgcatcgttagccgaaactctcaaaccatgcaacaaactatgtcggaaataacgcaaaaattctcggatgtggaaagggctgttgaaacactgcaagcaaaccaggtatctcttagtcaaaatgtcaatactatacaatctcgtgttcgttccgtgagtgcagagaatcctgtcggagttcggaggactattttcaattcacgaagctcccttgtgcgaaatggaatcagtggataaacaactccagatgccgctaacgcagtggttcaaccggaagattgggaaacacatctcagaggtgaagatcagctcgcagatcagcacgagcatgaaaacctcgaccagctcgagaccatgaggaaggtgagccaggaactaaaggaaatgaggtcaaaattccatcaggccacgagttcggaaccggatatcaaccgggtcatcgaagaagctaggcaaacatcgaacacctttcatcccataaatcgcaagtttgagaatcagggattcttggaagcttaatctagaaccgtacaacggtttggaggatccaaaaagctatctcgaagcttttctaatcgccgcaggacgagtcgacttggatgaagctgaggaagatgcgggatattgcaaactcttttctgagaatctttgtggnnnnnnnnnnnnnnnnnnnnnccagttagagccaggttcaatcagtaactttaacgaattatcagccgtgtttttgaaacagtattccattcttatggataaaagcatttcggacaccgatctttggaatttttcacaagggccgaacgaaacacttcagactttcatcactaaattcaagaacgtactctcgaagctcccaaggatctcacaacagtcggctttatcagctttgcgaaaaggattatgacatgattcgagattcaaagaagatttgatactacacaaacttgatactattcaagatgcggtattccgagtgcacaattggatggaatgtcgaagatgaaaaagaaagttttgcgaagagaaataagcaagcaaaaccagcagtcattttccacccaagaagttcgaacctcgggagaatcaaggaccaaggaagtttggttcacaaccattcaacaataacgtcgggaaacaattacaaggaaaaggaag

SEQ ID NO: 195031 - DNA, 280 bp, Arabidopsis thaliana landsberg
aacctctagaaaacaatgtaaacaagtgtataaggttactggacctagcgctaaaaactgcttcgtcgattgttggtatgtatggcgaaatttgcatagtttatcggaacaagtagaatagcagcaggttatcttccacgacctaagggctctataaatgaagctttccatgtgacttcaaatgctatcttaagcacaagacgcattcgatgaccatggagaatatgttccacaacatgagagtttaagagaacatccaactggctttacaatagtatga

SEQ ID NO: 195032 - DNA, 869 bp, Arabidopsis thaliana landsberg
gttataaacaagcacaatggccatttacagacttgcataatatcacattattcataccaattggaagacgggatgcttgcttcttggatccaatcactgactagtatgaaacacaccaaaaatcttatccttgcaaattttaatggtcgcttcgcaccaacaggtgaagacaatgtgctcaagctgtccacagagacattcaaccatccaagcctaagaacactctcgctatatcaatacatattacaagatgcacaagcttttaacaattgtaaaaatctcaagtaccttgacctgtttcaaatctttgctgaggttgatgttttcaacaaagtcatctcgtcttgcccctccctcgaggttcttatcctacaaatcattttcttcaaccccagtggtcatttgaagattgatcataaaacgttaaggatcttgtccatgtcatgcaaccaaattgatagcattgaagtgcgtgcagctcgtcttgatattctctccatagaatatatcccatgtgagagtgataacgtcgttctcgaaattcctagactccagtttggtagaaactattgggtagcaggaagactcttgcctcatactagcatcaacatctcatgtccccctcaggtacaagaaattacacttaaggatataaacatttatatttagtttgacatgtttgttaattgtgtatttaaatatagaagcaagaaagcaacgggatggtgaagtgggataccaactatgcaacatcacctgcatctttatctgtgagtttagatttgaagaatcctcgagaagtagaagtgctaaggaaaatcttagctgtgtggactgaaaaaatgatagaacttgaaatatcatttaag

SEQ ID NO: 195033 - DNA, 295 bp, Arabidopsis thaliana landsberg
cgagaatcgaccgttggatcctcttcgcaaattgaatccccttaataaattggattctttgaaggatcgacacttatcggaggaaggagagttcccgccatgggtaacaccgcattcgcggaggcttcttgcacgtagacctaaaaataatggaatcaaagcgaatgttgtggttgcaaaggacgggagtggtaagtgcaagactatcgcacaagcattggcaatggtaccaatgaagaacacaaagaagtttgtgattcacataaaggaaggtgtttacaaggagaaagtagag

SEQ ID NO: 195034 - DNA, 1132 bp, Arabidopsis thaliana landsberg
atggcccatgtttttctgtattacaggggacgcgtattacactcgaaagtggacccggttattttcctaattataaatagtgagtgtactacttccataattatgtttcataaacgtactaaatttcaacttattcctatttctattcaatatatgttattaatattttttaattttggatttaggccgagagagatggtgtgtatccggatcatctaacgttgatggaagatacacacacacacaaaaaaaccaaacaaattcaagatccggttgcaaaggaagttttagagaattcaaagaagaggaagcaagaatatctccttacccaaccatctatagatggtgtctagaatagtgacgtcccaatggagattgtcaacaaattcgtttttgaggtacttatgttttttaatttttttaattactatctcataatagattaatgaatatttgattggtatgttgagattttgttgccatatagatctatgttgcgtctctcctctagtattttatataatatcgtttttgatacatactattatatcttctttgcttgtaggaaactccaaaaagaaagggtcggatatttgggttaggaaaactaggtgtagctcgatataagtctcattccacatcgtcgtattcatgtgatcccatgcttgaggcgtctctcaaagagaaagaagcacggattgaagctttggagactcaaatggccgaagagaaagctgagaacaagcgccgaaccgatgagatggcaaaggagatagccgaaaacaagaaaagttccgagacgatgatgcgtttcatggaagatatgcgaatgccggtttcccaattctagttcttagttcttcttttaaattttagtgtgaatactttattttggatacaatgttattgtaatatgaatggtttttccatttagttattttattttgaatcattttaaaatttaattatttttagtttgcataatttataatttctttttgttaaatcaattgttttcgtcaggcattttccatcatcgtcggtaatccctctagtaataacggcacaaaaatgcatcggcaacttacatgttcgtcgtcggtaacaaccatcagtcatatctcggttaaca

SEQ ID NO: 195035 - DNA, 54 bp, Arabidopsis thaliana landsberg
gggcaaattggtcaaaagtttaatgaaaaagttggaaaagtgcctcatccctga

SEQ ID NO: 195036 - DNA, 476 bp, Arabidopsis thaliana landsberg
aggaagttgaagagagcatcagtggcattttatcaagtggtaatttgccagatgttgaggaggaacagaacaggaaccgtacctgaccaagcagtaagcatattagttttcacagtttagtagatataaataaagatctgtttttgacgacggacttttctctaacctttttgattttccttgtaataaagcttgtacatgatgatcaccaagaaacagaacaatcatcaaatggtatattactatttttttttgtttctcttatcgtaatttccttgtttcctccgtttttaccggatttttttactaaacccgttactcaaaccgaactaaaccgaaagatcttaaaacgttttttctttctgggttttgtttgcacagaagcttcaacatccggagggtttgggattggagtggacgaactcgttcaactagtcaaagaacgtagccttgaagctttgaatcgatataatggg

SEQ ID NO: 195037 - DNA, 601 bp, Arabidopsis thaliana landsberg
agtcctacctgaagtagtcgtggctcactacgaatgcgaaacttggggtcttccacgatctctaagttcttacatctcttctttcataacccacaaattcaatactcaattcccaaacgttacactcgccgtggcttacactcatgttggattgattttgatcagctctggcaacaaattactaacttactatgtggctaatccgatctcaagacaatgtgtcgaaatccctcagcctcctccaacagttggttattttttaacctctgggcttgtcacaaaacttgaggatcacgtcgttttaggttacaaagttgttttgatggatacaagtaacttggacgatgtcataagtttactgatatattcatccgagacagggttatggagtttcaaaaccctccaatctcatctcactttgtctggtctgatagattacaaccctgttagcttgtatggaaacctttactggataggctacaacaacgactatggagaggttgttgtgttccatgatttctacgcgactggcacggaatctgatcgatgccaagttacacctttccctgacggtggaacgaaaccaccaaatttaaaatga

SEQ ID NO: 195038 - DNA, 747 bp, Arabidopsis thaliana landsberg
gctcatctagatcctattatttttccggattcctggatgaatcccgcggaagacttaacatggtcgaacgacaaagatgatgttagggtcgagaacatcgtgaagatggccgaggaaggcaagcctttttcgaatgaaatgtttggtggcgggtgtatcccaactgaggttgtcgttgcgtcgaaaaaacaaaagagaggtggtaaaaccaaggtagtccgtggtaggaaagcaccaactaatgctagatcagctactggtttgagaaggaaaaaccgaagtcccatcgaagaggaaggtgaagggtctggtgggatagatatccctgctttgtcctgcatgattgatgataaactgaaggcgcaaggtgagaagatcatcaaaggggtgattcattggtttacggaaaatttgagcgttgatgctggaaatcgaaaaggttcgatttctggggaacacggtactcaggctgaacagacggctgctgatgctgatggaaataccaacgatttatcctccccggatccccccaagaaaaatgctgaagcggatgttaatcctattccactgccgtgtcatcccgttcctatggagactgatttcacccttccatcgtttcagggtgaccaagcggtagcagccgtagatgacgtagtttctttctataactccgttgatgtaccgacctgctctccacgcggcggtaccaatgtaaatggaaagaacgatgttcaggatagcggataa

SEQ ID NO: 195039 - DNA, 91 bp, Arabidopsis thaliana landsberg
tgttcttaacttggagactaatcacaacatggaaaattgtgaggttacattcgatgaaaatgcaccttgtccatcccctatctttgagcat

SEQ ID NO: 195040 - DNA, 238 bp, Arabidopsis thaliana landsberg
atgaaggcgcgaaccatggctgtcgcgcgcggcgagcgacgcgtctcggctggcgaaccaaaagtctggtttacctcgacggaatccttcgccaaggtcctgtcggccggcaatcgcgagttgctgcagacgattgccgagaagcagccgggctcgctggacgagctggcgcaaatgaccggcagggccaagtccaatctgtcccgaacgttgcggacgatggaaaactatagacctg

SEQ ID NO: 195041 - DNA, 313 bp, Arabidopsis thaliana landsberg
ctatctcagttggtggtttcgctgcaactattctacaacggagacgaaaacataaagaagcaccaagaatgtctaaagaagtagtaattaaaccagaggaaagaaacttcaccgagttaaaaccaattcctattactgaggaacatgagatacatatcggagaaaggccaaaactcgaaggtacttgttaattaaaactactatcttcttgagtaataatgtctataaagtttcatgtatttatttttgtaacacagagataatgtcggagtttgagaagaacttgagaggatggtcgagtgttggagtttta

SEQ ID NO: 195042 - DNA, 608 bp, Arabidopsis thaliana landsberg
atgtttaagaagatcatgaaaggtgggcatcgaaagccctctaaatccgaagctaatgaaccgtctagttatgggattggtctacctgataataggtcaggtcctggctccaatgtggtcgttagtcacgcttctcgtggtgcattggttaattcttctccgtcgccagtgactgcaactccacctcctccgcctttgggctcggtggagccactcccgttgtttagagatgtgccggtttcagagaggcaaactttgttcttgaggaaacttcagaattgctgtttccttttcgatttcactgacacgattaagaatgctagagacaaggagattaagaggcaaacgttgttggagctggtggattttatacagtctggatctagtaagatctcagagtcgtgtcaggaagaaatgattaagatgatttctgttaatattttccggtctctcccaccagcatcacacgagaatacgggtcaagagcctgcagatcctgaggaagaagaaccttatttggaaccttcttggcctcacttacagctagtttacgagttgctcctgagatatgttgtttcgactgacactgatacaaaggtggccaaacg

SEQ ID NO: 195043 - DNA, 348 bp, Arabidopsis thaliana landsberg
tcatgtacatggtatggatacatctcgcaaacactatggacattcaggaatagtggaagctgcaagagatctatttatgcaaatagaaggagaccccaaatctggaggtacgagttaagctataactgacccttgatgttgtacctttgtgatatgtgttcataaattgccacaatacaagcttctttacgctaatatacaaatgactacgcagagtcagaatcaagtgggttcttgtcctcattgattggtgatggttgtgagtgtgatggctacagcattcgcattgttgggcattctttagaaggtgctatcgcctcattactgggaattagagtacgtttttaa

SEQ ID NO: 195044 - DNA, 98 bp, Arabidopsis thaliana landsberg
gagctgcaggtgactcatcgaaatgcagtgaaatgagtgttgatgagaagagacagcttgtttatgaactgtcgaagcaatcacatctagctgctgag

SEQ ID NO: 195045 - DNA, 332 bp, Arabidopsis thaliana landsberg
ccggtgcgggagcatctggttcggctcgtaaactcagacatgatattcgggtgactagcacagccgtccttaagagagtgcctatgatgtatcagttgtgcatggatatacaccacatcttatcacactggcgaacagagaatacaaccaaacctattctgagatggatagcctatgagaacctcatgcatcatccggaggcatccgtgagaataaaaggttccaacgaggacattcaactggagcagacaatacatggtgctatacacacacgtctgcaccagatggtagaggtggatgacttcagagagctggggcttttcgactactag

SEQ ID NO: 195046 - DNA, 60 bp, Arabidopsis thaliana landsberg
atgaaagttgtccctgaactcctctcaagtgatggcttcaggatcggcatgggtggcaag

SEQ ID NO: 195047 - DNA, 128 bp, Arabidopsis thaliana landsberg
aaaaaaacattcttctacataaaatttctcaacaagttttgagtctaactacatttttcactgaaatatttgtttgccttcgagttgacccagggacccggatactcacgggctcggttgtaacatga

SEQ ID NO: 195048 - DNA, 309 bp, Arabidopsis thaliana landsberg
gcgtgccacccccacatccacacgttgaggcaacatgtcatggacacggaccaaaatccacgactgagcgcctgctcgagcacggcacgccgtcgacgcgatttccatccacgtcgaatttggcatggcgtatccactgatctcatttcccgtgcatcgtccagccaggaacaaccatcagaccgagaaatccagccagcagcccgccggccggcacagaaaatgttacgaggtagcagaaagaagagcgaagaacccatcattactcgttgcgaggattgtttcagattggtcaaagataagtgttga

SEQ ID NO: 195049 - DNA, 169 bp, Arabidopsis thaliana landsberg
atggtggtggtgacttcggtggttgtggtggtggtggtgctgctgctggatggtagtgatgaacctactaatgaaaaaagaaaagtggataatattattacacgagggtataatattatctttctttttctgttgcagatttcttaatcctaataataataatttataa

SEQ ID NO: 195050 - DNA, 311 bp, Arabidopsis thaliana landsberg
cctcggagccctgccagggcaaatcactctatcgcaaccccggagaagcaaacagcttagtttcactcaatcgcgaagccggaggaatcaccccatcagaagcactcgatcaccactcgatatccaggaagcctatctgctcattctgcactcagccagacaagctgagaacaaataagagaagagaagccgaagaaaccactcgatcaccaactcatgacatccactcgatcgcactcgatcagggggtcgctggaccattcaatctcgacttcactgcatctcactcgatcgcaagacagagcccttga

SEQ ID NO: 195051 - DNA, 66 bp, Arabidopsis thaliana landsberg
acatcgagcagtctgagtttcctgagtgtgttgttggagacctccctgagcaacaacctggtgaag

SEQ ID NO: 195052 - DNA, 265 bp, Arabidopsis thaliana landsberg
atggtatcaatccagactagttgcataattatcaatcgtttctctcctttccttcttaaacgatttcttcaaacttctgatcacacaaactcggtgctgtatctagcagtgtcaatggaaagcctttgcttaactcaacaagactttcaagtaaaaagcaccaaattaagctctcgatgtcgagaaaaatactcggatccagtaatggaaatccgttggtggagttatgaattgaaacagtacttgtccggtgtcgaagtaaact

SEQ ID NO: 195053 - DNA, 2530 bp, Arabidopsis thaliana landsberg
  unsure (1)..(2530): unsure at all n locations
atggctgattcaaaacagaaaattactgaaaagcttcatactcttccgtctgtgtttgtaccacatggaattgcaagtaggcagaatgatatgatatcgggaatattcttgtcacttgatgatgtttactggaatgattctgctggcgttttagatgagataaaagagatcagttcgcagatcagcagtgttgtggaaccattgcgtaggaaaacattgggcaatatctatccaggtctacatgacttttttgtgaatgggtgtggagtacctgagacgccttcgtttcaagagtaccttaaaattctagggcagtttgcacataatgtgtcaccctcatctgccgccaaggctgtaagtgatttacttaacttatcagtcttgtcctgtttatcttcactctattcacttctttgctaaagtgtttaatttatgtctaggtcttcaaaattttcctgaagtggagtgatgacttgaactctggcaaatcttctgaagatgttgttcattttaaagagagactttcagaactcgagtacactgtactccctactgaaaatgataagtgggtttccttgcactcctcgtttggtctcgtatgttggtgtgataatgagaagttaaagaagagatttaaaaacaaggataaaattgagtttattagctttggggaaaatgatgacgaagggcaagaagtgcttcaaacaaaagtgtctgggctcatgcacagtttgggcattccaagtatttctgaggtaactaatcttctccttcacaaaaatattttgaaatgcaagccacttagttatacatgcaaagtgcctcttatggacattagaattctgatggacaagagtaggcctttcttgaactgtgttgatgcactaactctaaaaccatccgcagaaccatcatcttgtagcttatatacagggtagaactgatatatgtgtctccgtttctactataacactaccgtttctactataacactagtttccatggcctcgattccaattcactctgtggtgtttatgtattttttttcaggtggtaaaacgtgaagcgaaatatgctggtttgcaagataatactgtaacagtgtcacttgttaactgggctctgccttatgcacagcggtatatctttactcttcatcatgagaagtatacccaaacaaaaaagacagtccatagtcaagtcaaacgtctacaagtctttgttggtgataagttatcctataggaatgtcataccgcaatatggcattagctctaaaaaggagttcaaatgcagttctcttctgcaggtatgtcttctttcgttctgttcttgcgacaatttaacctaaatattttgggattgtatgggctgtgacattgtgctttgaggctatttgaaactcatctctgtttatatgcaagtagacttttgccatatcctcttgactgggacaatggttttgtaaaaatgtggttttactgatattatatgtttattcttgttgtcttcaggataaagctctgtacacaacaccaannnnnnnnnnnnnnnnnnnnnnnnnnnnnnnntctcgtttgtttttcaacggagtgcctgatctgcatttggcaaatttccttcacttgatcaaaacaatggcagaatctgggttgagcgaggagcaaatggaatcattcattctgaacagtcagaaagttcatcaggttcctgatggtgaagagatctggtccctcaaatctgctgttaaagcgaagaagaaagctggaataagcttgagctggttaccttcaagttctaaaacaagacatggttctagcaagaccaacactgatgattctaaacaagagctggacactagtagcagcaaagaggatgtaacagaggctcttgaagaaaaaataccgattgagatgaccaataccaacttggtttctggatatgataattgtgcaggcacaagttcacgagctagtgagccaaacccgttgcattctatgcatatgattagtggctcaacctcagggaatcaggctgctatgcatctcaatccaaatcttcctcatgaatggaacaattccttcacagctaatttcagcgatagagaccagcttcatacaggcacaccttgggctgcacaagcgcaacagaccggtagaaaaggtgaagaaatcgcttacagatactttgttgcaaaatacggcaatgaggcactggttaaatgggttaacgaccagagcgaaaccggtttaccttacgacctaatgatcgaaaaccgaggtggtaataaagagtacgtggaggtgaaagcaacggtatcgacacggaaagactatttcaacttgacagtgagggaatggcaatttgcaaatgagaaaggagagagttacataatagctcatgttttgttaggaaacagtaatgcaatcctcacacagcatagaaacccggtcaagttatgccaagaaggtcatctccggttattggttctcatgcccaaccagagaaacgaggtcaacgttacattttaa

SEQ ID NO: 195054 - DNA, 177 bp, Arabidopsis thaliana landsberg
cgagacctcggctctcatcactgccttggccgttttcgtcgtcttccgctcggcttggcttattctgtggcttctgcctctagtactgcgacttctgagcaccttttttgcattacatcgcgagcctctcgtttcgacctcttcgtctgctgtcgacgatcctccccgcgactttga

SEQ ID NO: 195055 - DNA, 1140 bp, Arabidopsis thaliana landsberg
ctcagccgcaaccgccgccaccacttatgtcaagagtaagtcccaagactgtggacgatgcagttaaggctctggtcaaagagggaaacgaaaaatcaaggacggagaagccacagcttctagaagaagacggattcttttacctagtcgtagccctaaagaagattccacagaggaattttacgaacgcttatcgtattcctctcccgcatccgctaattaacactaccgaagactcaccggagctctgtctcatcatcgacgacagacctgaaagtggtctcaccgaggaagatgcgaagaagaatatcaaatcagagaacataccaatcacgaaagttgttaagctttcgaagctgaaatcggattatggatcattcgaatcgaaacggaagctttgtgattcatacgatatgtttttctcagatcggagagtgattcctatgttgccaaaattgattgggaagaagttctttcagagcaagaagactcctgtggctattgatttgaagcatatgaattggaaagagcagattgagaaagcttgtggtgctgctatgttcttcatgaggactgggtcttgtagtgcgatcaaagttgcgaaattgtccatggaaagcgatgatatcgttgagaatgtgacggcgactttgaatggtgttgttgatgttttgcctagtaggtggaaatacataagatctttgcatttgaagttatctgagagtttatctttgccattatatcagacagtgccttatttgcagctcaagattgatcctttaggtgttgaagaagttaagaatggtgaaggattagctaaaagtgatgttgatgatagtagtagtaagagtgtgaagaccaagaagaagaatggaaagattcatgaggttagatatatggatagtaatgatctgagactcttggtgatgatgaattcgataggagtgttgcagaagatgaggttgctgatgatctcaatgcttctgcagataagaagaagagcaagaagatgagtagtagtaagtctgcagtgagtgggaaaccagacattgtgaagagtaagaatgggcaaaagtcgaaaaagctaaagaaggacattgatgagtctggtggtggattcaaagctaagactaagaggag

SEQ ID NO: 195056 - DNA, 338 bp, Arabidopsis thaliana landsberg
acttacaaaactcaaaaactatcgaagctcaaaaagtcgttcctaagggaatgcagagataaaaatccacaaactacaaaaagtcgttctaaggaacgcagcgtaagtttgtcgaagttacaaaaagtcgttcctaagggagcatagtgtaagttttctgttcaaaagtcattccaaagggaatgcagagccaaatactgctgaaatataaggcgacgcgaaaaagtcaatgtgaataccaccaaaatagaaggcgaagaagttcaaaagatgttcctaagggaatgcagaacttacagcgaaaagtcagcgctgatacaccgaaaaataagcggtga

SEQ ID NO: 195057 - DNA, 1562 bp, Arabidopsis thaliana landsberg
atgtcagagcgttccccaggtcgtctctctcagagattccgatcaacttcaggtataaatacgcttcctttatgcaatctccctaattcgtagtttttccttgggatcaatggcttggcttagtttgttgtatttatgtactgtatgaaagtttgaatttttacttcccttttcatgttattgttttgagtttccaattgctgttttgttgtctctttgaagataatggatgaaaaaggagacaactcattagcattgcttcccgccaaacttcctatgcgcatgtgtagcacacgaggtacttttcttgcttaacaaggttgcttgattcttctctcaaacttgtacaaatctctcttatttgcttttttttttttttttttggtgtataagagagaagaaaatacacgtgcgagattcctccggatctcttgatggaaattgtaatgagattgccagcaaagtccatggtgaggttcaaatgcatctccaagcagtggtcatctctcatctcttgtcgatatttttgcaacagtttatttacttctgtcacacgacaaaaacaaccacatatacacatgtgtttagtggatcacggcgggcaacgtgtgctgctatcattatcatcaacgtctccagacaacacttgttatgtggtcgaccaagatttgagcctcacaggaatgggaggcttcttcttgaatcttgtccgtggcttgttgtgtttctcagttagagaaaaggcatgtatctataaccccaccactagacagcgcttgaccttacccgccataaaatccgacatcatagctctaaaagatgaaaggaaaaatatccggtattatatcgggcacgatcctgttaatgatcagtacaaactagtctgcacgattgggatatcctctgcatttttcacaaatctaaagtcagagcattgggtctttgttctagaagctggaggttcgtggagaaaggttcgtacgctggagagttaccatcctcatgctccttccacagtaggacagtttatcaatggatcggtagtatattatatggcttggcttgatatggacacttgtgctgttgtgagtttcgacattacgtctgaagagttgactaccatcatagtaactctagaggccggggatgtggctctgcctgcaggtaggatgaaggcgggtcttatacagtatcatggggaaatagctgttttcgatcacacccatctcaaagaaaagtttctggtggatttatgggtattgaaagacgctgggatgaagaagtggtcgaagaagaggctggttttacagccttgtcaaaagcatttagtccatgatgacattgaactggtcgtaaaaggtacaactcaagatggcaaggttatcttggcaccggtaaacatgtgttctcaattatatattttgtgttacgatatgggaagcaatgacctaagaaaggttgaaatcaaaggagtaccagacatttggtttgataaggagtgctatttcgacttgaagtactctgtggatgagagtgaggacgtcatctacttggaaacttga

SEQ ID NO: 195058 - DNA, 297 bp, Arabidopsis thaliana landsberg
gccccggtcgcgacgccatctctctcccggagctctccaatgacgagctcgccctattcctcgccttcctctacaccggcgcgctggaggaggacggcggcggcggcgcgggcctctcggtccagccggtcccggaggagcgacagctgcacgcgctcctcgttgcggccgacaagtacgacgtgccgttcctgcggcgggcctgcgaggcgcggctggcggcgacggcgcgggcctctcggtccagccggtcccagaggagcggcagctgcacgcgctcctcgttgcgaccgacaa

SEQ ID NO: 195059 - DNA, 626 bp, Arabidopsis thaliana landsberg
tcaacgaacccaatgcgaaaccgcttctctaaccctaaattcgaaaacgaaaaccaaattctcgtttccctcaacaggatagaattaagaaatcaaacgacggagaaatcgttaaactctaaaacgacggagaaacaacaaatcctcctcgtagattccgtggagaaaattatcagtcggtttcagtacggagaagataaaaccttaaaatcgacggcaagggaaaacaaaagaggaggagaaggatctttgtgttctgatgaaggagacacacaccgtccgtcgtcggtttatatatttctccttattattattttatggttaattctgaaattaattcgcctaaacaaataataaaaacgaaaataaaaaaaacgaatatgctgacgtggcggttgaatggaacagtgtttggctccagggattggggacgagggaagactgcgaattttcaggcgtacgagagcgccaagtcgaaatcttccttttcatcaaatctgacgtggcgcatcaataaataactctctcgtttttcttcttgtcacacaacttatttagaaaaatcgaagcttgttgggctacatattgggcctacgatgtttctcgtggaacattttgacaattaa

SEQ ID NO: 195060 - DNA, 51 bp, Arabidopsis thaliana landsberg
atgacctcccgaagccaaccccacacctccgttggacctctctcggcgccg

SEQ ID NO: 195061 - DNA, 57 bp, Arabidopsis thaliana landsberg
atgtgtgacgtggtgcgaggtgacgcgtcgcgcgcggtggtgcgagggagtgtggcg

SEQ ID NO: 195062 - DNA, 68 bp, Arabidopsis thaliana landsberg
atggaatcgatcgaaacggagcgaccaccatacttggaaaaatataaacgccaaacccgatgtcctgt

SEQ ID NO: 195063 - DNA, 111 bp, Arabidopsis thaliana landsberg
ctagccctcagacatgaaggcagtagtagtggcagcaatgacacaattggagacctggaagccaaagtggaacagcttcggtcagagctacgtcaccggaatagggcatga

SEQ ID NO: 195064 - DNA, 112 bp, Arabidopsis thaliana landsberg
ggatctgatgatgaggatgatgatgaagagtcttctcagcctcactctagtagccagactgatagttcaaaacctggttctcttccccaatcttcagatccctccaaaatag

SEQ ID NO: 195065 - DNA, 218 bp, Arabidopsis thaliana landsberg
gtacgcggcaacggcggtggctcccggtggtgtcggcggcgatatttttggtggccgaggtaagcagagaaggaaggaaaggagggaggagggggtctgtcctgcccgttatggccacaaacgggtggactcggtgataggatcgtcacacgcgacgacgagcattgcgcagaggttacagtgatctccggcatgtgcgcgaggctggacgcctacgg

SEQ ID NO: 195066 - DNA, 263 bp, Arabidopsis thaliana landsberg
gaggttcgccatctctttgttggcactgggactgacagtagatcagctatcacaaagaaaattctaggtctggtaaatctacgcactctcatcatcgtcgaagagtacagcgaaaacaagaggaaaacatttgcagctgaagatgctgaggaacggtcaggtcgcgccttagttaacgaggaagtcttggacagaatgttcaggagcctgaggaaactgcgggcgctggtcgttacaacgagacagtaccatgaacgagcgtt

SEQ ID NO: 195067 - DNA, 91 bp, Arabidopsis thaliana landsberg
acaaagaaaaagcgacgacgtacgggttgaagaagatatgagacctcccaaattggatggttgtaaggaatctggttcgtgttcggttttg

SEQ ID NO: 195068 - DNA, 175 bp, Arabidopsis thaliana landsberg
gatcgttaacagcgacgagctcaacatcatccctctgaagaacaactctagcaaccaaacgaccgattcttccgaaaccttcacgaagattcaaaactcagcttctacagatccaaatcacttaaacctaacaaaaaaacttatggaattcgataagaaaaacactcaccgttga

SEQ ID NO: 195069 - DNA, 304 bp, Arabidopsis thaliana landsberg
atgaccgcctatgccgatattaccggctatgccgaaatgccgccattgtggtcgctcggctatcagcagtcgcaccgcacgctcggcgagccggcggaaatcgtcgccgaggccaggcggttccgcgacgagaagatgccgtgcgatacgatgatctatctcagcaccggtttctgcccgaacggctggaatacctataacggcgaattcacctggaacgacaaggtttttcccgatcccgccgccacgatcaaccagttgcatgacctcgatttcaaggtggtgctgcatgtggtcgtcgagg

SEQ ID NO: 195070 - DNA, 843 bp, Arabidopsis thaliana landsberg
atggccaaagtaattagcatgacgtttataattatgatactagcggtaatagtgatagaaggcgacgcaaaatcagagatagaatgcagtaagatttgtcgagagcactgtaaacgctcatcaccagcatctgaatgtgcggcttgtcgtaaaaaatgctacgaatctccaccagttgcagtgagagccaggaatcccatcatggagttagaagagcaaaaatatcatttgttttagttaaatataatatatatggtgatttatagatggagaggtcaatacattttaatatttctatgcaactgattaataataagatgataaattacatgtttatctctccatgctcaaattagtgatttctttttttaaagtacaaacaaatagcatatatagtagaagtgtgaatgaaactggttgaatcttggtaatattattatttttacttcgattggaaaattatttttcatgcaattatgaaagtgtttaatcagtaaaaatccgttgcataatgctagaaaaacaaaggcaaaagtgcagaacatgtgttttggcttaaaaaatacatatgccatttggaaatgaatgggaagcacgtatttgctgcatttgttctctagcaagaattagaccatttggttttcgatgatgcatatagctttcgcaacaaagacagaccgagctcaaatttctagcggacccataacttaattagacccaatattgcaacataatttttttgaaaataaaatatttgggttttttttactaaagaaaaaacccaaaaggtctgatggacgctttgctttggcactctcagcacatgcacatgatcgggcctga

SEQ ID NO: 195071 - DNA, 889 bp, Arabidopsis thaliana landsberg
atgacagacagaaacgactcaacctccaagtgtgctctgataccacttgatatgatcctggtgaggaatcaatcccaatttcggcacttggaagatctggagtggatattcccgaaatagaaaggacacacgactgaaagacgagatgatggattgaatgacgccacaaaaggatgcggaaaagccttttgataagttgagaaaagatcaaaattcgacatacaaaaatggatctatgatctatttttaaaagagagtttttgataaaaagatagatgggttctcataagagattacatgagtttataaagagaagaagaaaagaagagaaagagacaagtcttggaacatactccaaggctgcctagaaacacaacataatattaaagatagaatttgaatagaaaagactctttgactgtaaagatgactcttgaaatgctattttcgtcactcctcttgaccagcaaattactcacttggtttgggctcttcttgggcttgtgatggtcataaaattggctggacttcatatatattctaaccaacttttgaatgttataccatggtttggatcatcaaatgggtgatttgaatgtgaatcatttgcctcattaaaaaccttgttaagaaaacccattgggacaaaacttgacaagggaaaaagagtacaaatgagacacatgcccatttgatgatcatgtatcaaaaccaatgaggttaagataacatctttcccatactctttctccgttataagttcattttctgattcaaaatgctcctcaggttcaagctgctcctctgcttcaagctcttccgcggctacaagcacttgatcaaattccatgtcctttgtgctttccatgatcacatcaatctgggttag

SEQ ID NO: 195072 - DNA, 809 bp, Arabidopsis thaliana landsberg
atgaaagctttgaaaagcaagaacaaggttggttagtgttttggagacgaatatgacttgatgtcatgtgtatgattgagtataagaacttaaaccccaacccgatcttataagcctaagtagtgtttccttgttagaagatccaaagccaaaaaatcatacggactttggctacaccatgaaagctttgagaagctagaacaagcttggttagtgttttggagtcgaatatgacttgatgtcatgtgtatgattgagtattagaacttaaaccgcaaccggttcttataggcgtaagaattgtatccttgttagaagacacaaagccaaagactcatatggactttgtctacaccatgaaagctttgagaagcaagaagaaggttagttagtattttggagtcaaatatgccttgatgtcatgtgtatgattgagtataacaacttaaaccgcaaccggatcttaaaggcgtaagaactgtatccttgttagaagacacaaagccaaaaactcatatggactttggctactgataacactagattttaacctttttaagcccttgtttttcatgcatttagcttagtttcatgcccttttttatgcattcttagtctcttttccttcttttgcacattttgcattgcattgcatagcatacttgcatttggagtgttttgcaggtgaattaggtacttttggactcaacttggaggtttctaccacaagggatggacagactcgagttcggaggacctaaggaagaattttaagtatactcgacctttatactcgatgtgcatgtcga

SEQ ID NO: 195073 - DNA, 937 bp, Arabidopsis thaliana landsberg
atgagagcgccgcgttcgagaaagagcgtgaaattgctggtgaggttgaagcttccagaaagccacgtgccctccgggacattgagctgggccccaccctccgccgcaaaaccttcaaggtgccttacggcgcggcggaaagcggccgtgttcgacgtctttcccgtctccaacaccgccgaaatcggtaatcgacataacgatccggttagggaacgggtcgtgattgaaaaacccggagcaggtaacagggtcgtcatattgagaagtcgggatccagagagggagaaaagaattggaagagatttggagagagagaatcgctaagacggtgaaaacaaggagaagaaacgcccacgaaggtcttgtaatggcactcaatactgtggtcggattcttctccggttccattgttttttggaaacagagagaaaactcaaaagcccatgaagcaagctctgagataaaattacaaacagaagaatgctaaagtgggacttttagatggttggagagaattatgcatgtgtgtggcaatgattagcgtagtgtggtggtgacaacaaacaaaggtggaggaagatagaaagtcgatagataccttacctcgaaaattcgtctctctctttgattctttttgtatatataaatagaaaaaagaagtagtaaataagaaaattggatacagacacagatatgtcgtgaaaagggcactaaaatattggatggtgcatgtgaatcgtcaaaaagtggcaaggagaaagtgaaagtcttcacgaattatattttggtttatatataaaagaagaagaaagaagaagaaagaagaagaaagaagatggatgatacacaatcggtcacggactcacgggtaggaaggattgtgaggcgttacaatctcgtcagacttccaagtcttaatctgatgggcctttaa

SEQ ID NO: 195074 - DNA, 1988 bp, Arabidopsis thaliana landsberg
agttggattgcagccttgttggtaaagcaaattcttagccacaaagaatctctggtccgtgcaaattctgaattagctttcaaatgctctagagtagaggtggattatatttattcgatattgtcctgcatgaagagtctgttcctggagcatacacaaggtttgcagaccgattgctttggtactaattctaaacagtcagtggttagcacaaaactagtaaatgaaagtctctcatgggctacagtgcgtgacgaaaagattaatacgaagtcgatgcgaaatagctcagaggatgaagagtgcatgactgagaagagatgtagccattatagcacagcaacaagagatatcgaaaagactattagtggcataaaaaagaaatacaagaagcaagtgcaaaagcttgtacaagagtatgaggaaaagaaaatggagctgttaaatatgtatgcagacaagaagcagaaacttgaaactagtaaaagtgtggaagcagcagtaattcgtattacctgttcacggaccagtactcaagtgggtgatctcaaactgctggatcataattatgaaagaaagtttgatgaaatcaaaagtgagaaaaatgaatgcctcaaaagtctggagcaaatgcacgaggttgcaaagaagaagttggctgaggatgaagcctgttggattaatcggataaagagctgggcagctaaattaaaagtttgtgttcccattcaaagtggcaataacaagcattttagtggttcatcaaacatttcccaaaatgctcctgatgtacaaatttgcaataatgctaacgttgaagctacttacgctgatacgaattgcatggcttccaaggttaatcaagtgccagaagcagaaaacacattaggaaccatgtcgggtggcagcactcaacaagttcatgaaatggtggatgtaagaaatgacgagacaatggatgtctcagctttgtctcgtgaacagcttacaaagagccagtccaatgagcacgcttctatcactgtgcctgagattttgattcctgctgactgtcaagaggaatttgcggccttgaacgtgcatttgtcagaagaccagaattgtgacagaataacatctgcggcatcagatgaagatgtttcatcaagggtgccagaggtatcccagtcactcgaaaatctttctgcctcccccgagttttctctaaatagagaggaggctttggttacaacagaaaatagaagaacaagtcatgtgggttttgatactgataacattttggaccagcagaatagagaagattgttctcttgaccaagagattcctgacgagttagcgatgcctgtgcaacatcttgcgtctgtggtagagactaggggtgctgctgaatctgatcaggtacttactggccctgtagaatagttgatgccttgttcatttaatcttttctaatgttcattcttgctttcttgaaaataacgggtagtgatcagatgtctttttttctcttattaaattcacttttctggacagtatggtcaagatatatgtcctatgccttcttcactggctggaaagcaacctgacccagcagcaaacactcagagcgaaaatcttgaagaagcaattgagcctcagtctgctggttcagaaacagtagagactactgattttgctgcatcacatcaggtccctattgaagactttccttttttactagtttaaagttatcaatctgtgttatgttcattctaagtttccgtgagaaaaaggtggggaaatgtggttactgatcaagtctcgttgttgttttaaatcgactcttttgacagggtgatcaagttacatgtcctttgctatcttcaccgactggaaatcagcctgcgtcagaagcaaatattgaaggccaaaatatcaacacatcagctgagccccatgtagcgggtccagatgcagtagagagtggtgattatgcagtaatagatcag

SEQ ID NO: 195075 - DNA, 320 bp, Arabidopsis thaliana landsberg
atgatgatcgagcagcggcatgaggccggaggcgatcagccggtcttcgatcgcatgcaggcgcgccggggtctcgggatggccgaaccccatgtcgtgcttgagacaggcattgtgcgtgatataggcggttttcatcttgcggcctttacctagagtccgatcgacaccagcttcatctgcgcgtcttcggcgctggcgcggaccttgaaaccaagatcgcgcatcaggcgcagcatgttggtgttgtgcttgagcaccaccccttccatatgtttaaggccatgctcgcgcgcggcgtccatcaagagacagcatga

SEQ ID NO: 195076 - DNA, 475 bp, Arabidopsis thaliana landsberg
atgctgcagacccaggctgtcaaagatgcgcgccacttcgtcgcggctgaccggaacacccaacacacggtggcatcgatcaagacgcatggccacgggcttgcattgcggcacattgacatgcagatcgtcgaccgggcccgcctgaccaccgcatacgtcgacaagcagacgggtcatgaattccaggtcgtcgacaatgggtccgaaatctacgccacgctcgaaacggtggctggcttcagtgctgaatttgtagtgtcgggcacgccccataatggcttcaggccaccagaaggccgcttccaggtacacacttgtggtgtccagcgtgacggctgtcgcttcgccgcccatgatgcctgccaggctttcgacaacgccatcggcttcgatgacccctacatcgggagtaatgtcgacggtctggccattcaaaagctcaagtgtttcgccctgacgaccccagcgcacg

SEQ ID NO: 195077 - DNA, 260 bp, Arabidopsis thaliana landsberg
gtaattctgtagaacttattgaaaattctgcagaaacgtcaaagctaggtgagagcgcagttgcaaacacaactacaaacataaatatgtatctagtactagtacttttggtattgctgtgcagtatttataatggtaattgtaagagtcttccaagtagtcctcctgttttgccaaactcttatgaagcgctcatgctgtacactggcctgatgactttcaaatccacagagtattatgataatgtaacactacagtaa

SEQ ID NO: 195078 - DNA, 291 bp, Arabidopsis thaliana landsberg
gcgattctcagacttgctgatgaagagggcaactatttgcaagatgcctgggagcatatactaacttgtgtttcccgttttgagcaactacatctcttgggagaaggtgctcctccagatgccactttttttgcttccaagcaaaatgagtcagagaaatcaaagcaacccaaacagtatatacttcctgttctgaaaaggaagggtcctgggaaaagtcaatatgcagctacaggtgtcttgaggggttcatatgacagcatgagtcttggcggaaaaggttctaagaac

SEQ ID NO: 195079 - DNA, 113 bp, Arabidopsis thaliana landsberg
atggctcatgaagaagaatggtgcaatgactataagctctatcatgagaacagccatggcaaagaacggaactttatcctcgcattttctaaaataagaatagctccgaatag

SEQ ID NO: 195080 - DNA, 223 bp, Arabidopsis thaliana landsberg
acttgttcttttccatgagttcaataaggaaaacgagcctttccacaggaacctaattaacatcggatctcataccaatgtcggaatgcaaacgattcatacaatacttactatacccaccaaccaacaccagaccaccaacttccagaaacgggaactacatatcgaagtgtcgaagaaaacacagaagcagaaaagcaaaatctttctttactcaaactaa

SEQ ID NO: 195081 - DNA, 127 bp, Arabidopsis thaliana landsberg
aaaaaaacaggttagcaccgaggttgctgccgctgatcaagcggaggctgatgttgtcgataaggttcaccatgccggaatcggaaattggcgtcatgaactgattgaaaatgagaatctccagtaa

SEQ ID NO: 195082 - DNA, 507 bp, Arabidopsis thaliana landsberg
aaaagtagaaaccgttttgtttttgagaacttcagggaaccccctcctgaaactctcgctttggcccttcaagaggctgcagtttggaaaaaagcaacctcaattgacgaggaccacatcgaagattctatcccccctgttttcgtgcaagctccccctgctgagttccctgaatgtcagtttgacgcttcttggcatgcagatgattctctaagcggtcatggctgggttcttgtccgacacgacgccgtcctccatatgggactcaaaagtgatcgccggagtttatcaccgctccacgcggaatttgactccttgttatgggcgatggagtgcttgatctctattggtgagacgtctggcgtatttgcctccaattgctcaaatttgattactattctcgacaaccaagacgattggccaacattcgcagcggaattggcatcttatcgttcattagtgtgttttttcttttcttttagtattcgtttctttcctcgtaattaa

SEQ ID NO: 195083 - DNA, 297 bp, Arabidopsis thaliana landsberg
ctgcatgctatctggaatgtaggttatgatgtctccaagggatggggcacggtacacgtttcggcagatgcggcacaagagtgggccaccacagccaatcacgggtataattctcagtatctgcaaaagacacctaacacggtcagtgaattcagctttaattatgtaaaagatattcctgctattaaaagtaacattaacgccacggcaggatacggctattataacaacctgaccactaattataattacccgaatcttgattccaagggcgacaccataccgggctcggcaccg

SEQ ID NO: 195084 - DNA, 455 bp, Arabidopsis thaliana landsberg
atggcgtcagagagaacgtggagccactggcaatcggtgcgttacaaaatctctttaggattgttactataacaaatccccattctcatgagatcacgtcccctttatataacaaatagaaacttgcacctcaagtttcttcaatcacacaaaagacatatttccaaattccataaagaaaaggttttcttttttgccaatttctttttctcttcaagcaaacttcctttttgtttatatgagtctttttgtcttacagcaaagataatttttctttttcttgacgtgacacactctcctaaatccaagtactcgaacttctcatcatcatttatgcatttcagcttcctgaatcatttcttgcactacttcgacgactagtacagaacaacgaaatgattggtaaagactattgggtaaagactaaagagtgtgattcttactgtctaagctgg

SEQ ID NO: 195085 - DNA, 569 bp, Arabidopsis thaliana landsberg
aatggctaacaaatggtttaaatgaaaacggctctaccgtgtcggtgactcctgcaacaaactgtcatactcaaagccaatggcataaaccaaaagcggggtggatcaagtgcaactacgacgacagctttgtgaatcacaacggaggctcaacagctgcttggattctgcgtgatgaaaacggtatttataaaggagcggctcaagcaactggtgtgcaggtcacgtctgcttttgaagcagaatgccaaagtctaattcttgctatgcagcatttgtggatcaaaggatacaggaaagttatatttgaaggagactgcaaattgctagtcaacgttctatctgggaagagtctgaagtttgatgccatcaattggattaatgaaattaaagcttggggtcttaagtttgaagccattgagttcatatggtcgtatcgatcaaccaaccaaccagctgatattttagcaaggagccaaagacgtgctgtgtcatcttacctctttcataactatgtgcccatttgtatttctcatgctctgttttttgattacattggttctgaataa

SEQ ID NO: 195086 - DNA, 158 bp, Arabidopsis thaliana landsberg
ccatattcacaatgaaatcagggctgtcagtcagtagccatacaagcccagaaggaaattcacgtcagagcgagtcgcgcctggccgtgcctgatttgcttgttcctggacgatacacgcagggacgacgacggtgtttgcaccccacatctccacag

SEQ ID NO: 195087 - DNA, 64 bp, Arabidopsis thaliana landsberg
atgtaccgagaggcgttgtggcagaagagaggtcgtcctcgggagttatatccggacgtatcta

SEQ ID NO: 195088 - DNA, 381 bp, Arabidopsis thaliana landsberg
atgatcgatttgggcatgatcaaaagcgacaccatgaaaagggcgctgcttggcatcgagcgcttggcttatcgccatgccgatggtttgtcggtcatttgccctggctttgctgaccatgtgaatgcacgcggcgcaagcggtgcggtggcagtcatccccaattggatcaatgtggacgaaattcgccccatgtcacccagtggagaacttcttcaaaaggctggaatttcgcaaggtgccaaggttgtgctttatgcgggtactttggggcatgtttctggtgcgggtgttgctctcaaggcggcgcaacttgcccgtcatcgaaaagacgttttttggctgattgtgggagaggggcccagactacctgagttgctg

SEQ ID NO: 195089 - DNA, 478 bp, Arabidopsis thaliana landsberg
  unsure (1)..(478): unsure at all n locations
atgtccgctctttggagatggtcaagtggttttttctccaactaccactacgtcaagcctagtctggatgataaccagaccttcaagctcgctgccaaccccaagccggtcgttgagttcctcgaggccaagnnnnnnnnnnnnnnnnnnnnnnccgtcatcctgggtcctgtctccttcctgaccctcgccaaggctgaccgtgnnnnnnnnnnnnnnnnnnnnnnnnnnnnnnnnnnnnnnnnncctctttacgtcgagctcctcaccaagctcagggaggctggtgttgaggacgttcagatcgatgagcctgtcctcgtctttgaccttccccttaagtctaagaacgctttcaagcctgcctacgagaagcttggctcccttggtgcccaggctcctcgtctggtcctcgctacctacttcggtgacattgtccacaacatcgatgtcctccctgctcttcacaacatttacg

SEQ ID NO: 195090 - DNA, 273 bp, Arabidopsis thaliana landsberg
atggcccgccgccgccgggccccgatgcgaccgcacgcctatgcgaccgcacacctggccaacaccgcctcgctgctgcttccggtgtccaacctgaccaatctgctggcgttccaccaggcggggctgtccttcatggagttcaccgccctgatggcggcgccctggctggccgccacggccacggtcaacctggtgttcccgtggttcttccgcgccgatctgcgtgcgacaacggcgcaccggcacgccggcccgcccccgccggtcccg

SEQ ID NO: 195091 - DNA, 437 bp, Arabidopsis thaliana landsberg
tttctaagggatccttctatcttgaagcaaaaatgcgaaccttagctcatcggctggtagagaagttatggtatttgattttgccaacggaaaattttatagagtttatcaagtcattttcagggctactctttgatgctgcggaattgggaaatgttgagtttttagttattcttattcgttctcatctagatctgctatggatagttgataataataaccgaactttattccatgttgctgctttatatcgtcatgaaaatatcttcagcctaatctatgaacttggaggcatcaaggatttgatagcatcttataaagaaaaacaatctaaagatactttgttgcatcttgtggcacggttaccacctatgaatcgtcaacaagttggatcaggagcagcacttcatatgcaaaaagagctcctttggttcaag

SEQ ID NO: 195092 - DNA, 1152 bp, Arabidopsis thaliana landsberg
gtgatagagactttccagctaaagatcagcggaaatcagctgatgtccagatgtacgaagtgcaatgggaaatttattcagaaacctctaagcattgaagaagctattgaagcagcaaagggtttccaaagaatacccaactgcttatttaacaaaaatttagagttttggcagtgcatgaactgccatcaactatactgggaggtaagtcacctaccccatcttttgccgttgtgcattctagttcttgaacgagtataccttgtgtcaaaaaatcatctggtccatctatgttagttgttttgctgattgaacagtcaaattttagttgcctaacgatatttatcaaatcagtgatccaattaatatttgtatgaagtcttagttggtgaattgaatcttgatttctttaaaacatcttcatgtgttcatgtcttagagcagaaatcatctccacaagattcataacttcctatatagctctgatctgttctgtctctaatagtcagtgtccgacatatttaatgtttgttatgtggtttcagggaactcagtatcataacgcagtccagaagttcatggaagtatgcaagttgagtgagtgattcactttttttttttttttgggtttttacaattttggtgaagtgttcaatctctcgttacctcagttcctcaaatgtttttattttatatcaaacgtctctaagcaaacaagatgtgtttgtaacttgtgtcgtttgcacacatgtgttccagaggttattaaccgtgtacaaatgttttagtttgttttacgaagttgaacacattactatcttatgagaagaatagacttgtagtattttctatttaccagttaaattcttgcataattttcaaagtggaatattattttcaatatgctttcttgagatgatggcttttctagccgtagattcatgcattttaaatatgatgatataccaaatttaggtattgtggattggattggtctagttcattagttaggcaaaaaatttaacctcatcaaatcaacattacctctcttcctaattttctccattgaattcttgttcaaccattttttttctttcactagcaaatacggtgatgaactcgaaaatgatatctttgcgacagatgaattaa

SEQ ID NO: 195093 - DNA, 449 bp, Arabidopsis thaliana landsberg
cttctagttctatgcaaaaatacgacgatagttctctatctttccagatgaatctccttccatatacaaaagcactcatgcctcctcgctctctcgcaattcacaaagattccaaacatctaaagttttcaattttacaacattatcgttaccatctacttgattctctgcaaaaagagaagacttttactgagaagaagaagaaaaagttgtctgattcattgaagaaactctacgaaacaaacccagttctcatatcgtttaaggtaaatgggctaagactcttctctttgattctcgttcttttgatgggtttgtctattgtgtatgaaagatgatgagattagggtttatttgtgtgttgttttcagggactacaaaagctaatcgaagatgaatccagagaaattcacacacaagacatacgagacaattgctacagttcatga

SEQ ID NO: 195094 - DNA, 982 bp, Arabidopsis thaliana landsberg
ggtcagcttctacgtttcctgagaatgctaaaagataaaggaaagaagctttttttgctgaccaactctccgtataattttgttgatggcggaatgcgctttctaatggaggtaattcacattattgaatagatctaaaactcttttattttctcgttggaatatcactagggacaatcatttcaacactttttttattttaattagttgtccataatcttcttacggccagttccatattttcttttttgtttaagtggttcatgacctttattgggttgtgcttattgttcgttaggaatcttttggcttcggagattcctggcgagaactctttgatgttgtgattgctaaagcaaataaaccagaattttacacatctaaacaccctttccggttagttgtcattacgatataaccagaaacactatgttcttgtgtaaaacataatattttcttgtggaattgatcgcttaactcttttattgctattaatccttgtagttgttatgattcggagagggataagtttggcatttacaaaagtggatgcatttgacccaaagaaagtttattatcatggttgtcttaaatccttccttgaaatcacaaagtggcatggccctgaggtactctttacaacaagctgatatattccattctgtaacttcatgcttttgaatgcatttaaagacagactaccacatgttttattcataggtgatttatttcggagatcacttatttagtgatctaagagggccttcaaaagctggttggcgaactgctgccataattcatgagctcgaggttagtttaccatacttgatgtctatatagctttttagttgattgtatcctcaaaagtgtttgtacatcatttaaagcccaaccttgtacactgagttctctttatgatgttatttttttggttcagcgagagatacagatacaaaatgatgatagctactcggttgagcag

SEQ ID NO: 195095 - DNA, 499 bp, Arabidopsis thaliana landsberg
atgggctatcctagtgcccattttgatccaacaaagtatgaggatcctttagaatttaatccatggcgttggaaggtgatttaaaattttatactcatccttaagttattatctccctatatcactaatcaaattctgaaagttctaatatatatctaaatttattaacagggaaacgacttggacgcgatcgtctccacgaattacattccctttggggctggtcctagactttgtgttggggcttactttgctaagttgttgatggccatttttatccaccatttgtgtagatataggtttgttttttatcacctaatgactcatgattcaatttatttgttactatatagtctaagtcgttacttctatatatattatttgtaggtggtcaatgaaagcagaggtcacagtaactcgaagctatatgctcatgtttcctcgtggatgtgacgttcaaatctcaaaagacacccaagaacatgattcggatgggtaa

SEQ ID NO: 195096 - DNA, 344 bp, Arabidopsis thaliana landsberg
agcaacttgaggatataatcagtgaagaaaaagctgcaagtgttacggacgagaatgcaagtattatcattccttttcaaaaactagaatgtcttagcttatctgatttacctaagctaaagagcatctactggtcaccattgtcttttccacgtctgagtgagcttgcagtgcaagaacattgtccaaagctgaaaaagcttccattgaactccaatagtggaactgcaggtgtagaacttgtcgtaaaatacggcgaaaacaaatggttggaaggtgttgaatgggaagacaaagccactgaactacggtttttggctacctgcaaatcgttgtatcgatga

SEQ ID NO: 195097 - DNA, 240 bp, Arabidopsis thaliana landsberg
atggctgacgaacagaatcaacaaaatggccctgccaacattggtgctggagatgcaccacgtgatcaccgtcaacggaaaggaattgcacctcctgctatccagaacaacaacttcgagattaagagtggtctcatctcgatgattcaggggaacaaattccatggtctgccaatggaggattcactcgaccaccttgatgaattcgatagactctgcaacctaacaaaaatcaatggt

SEQ ID NO: 195098 - DNA, 339 bp, Arabidopsis thaliana landsberg
gattcatcagtttggattgtggattagcttctaacgagtctccttacaacgaagcaaatagcaatctgacgtacatatccgatgctgatttcattcaagtaggacagtctggtaatgtccagaaagaggtgcttatcttactcaggaagccataggcggttatgagatcctttccggatggaatcttatattgtcacagtctgaatgtctagcaagacgcgaattatctaatcaaggttatgtttcgatatggaatctatgacgggtttatcaattatccaagattcgacctccattttggtcctaagatttgggcccccatcgatatgggcaaggcag

SEQ ID NO: 195099 - DNA, 132 bp, Arabidopsis thaliana landsberg
gagctgagggagaaaggttcatcaatggtattgaattgcaacgggatgacgactgagaagggctcaacgggggcaaggaaaagaaggcaaatgaaggctgagtcatataccgtggtccggaaggagaagtga

SEQ ID NO: 195100 - DNA, 338 bp, Arabidopsis thaliana landsberg
gtggaggaagagtttggaaagtttcctaaagaaccctgatgacgatgaaagacatcaagaacaaatatctcacagaactttaccaattttgtcttttgaatcggtgaaagagattgatatttccaagtgtcagaggcttgattataaagttgtgatcaagtgcttctctaagtcattcccatcattaagaaaactaagagctgcttatctcttaaacatcaaggtgtctaccctgcttgaacttctcctgaattttcgcgagctcactgaagttgatttaacagttgatgtctctcctataataccggttcaagcatctgtgttttactctggccaag

SEQ ID NO: 195101 - DNA, 125 bp, Arabidopsis thaliana landsberg
aaacaactgtatacgagatgttctctctcactcattttcgcaggccccttcccattttcccagaaattgcaagaagactaaaattcaactacacaaccaacgtaaccagtgaagaggacgtttaa

SEQ ID NO: 195102 - DNA, 344 bp, Arabidopsis thaliana landsberg
gtgaaattcctcgaagtctcgggaacctctcgtttctgtccaacatcaacttctcccacaatcatctacaaggattcgtgccacggagcacacagtttggaactcaaagttgtgcttcattcgtgggtaatcctggactctatggcctcgatgaaatttgtagagaaagccatcatgttcctgttcctacatctcagcaacatgatgagtcttcttcagaactagaagagccagtgctgaactggatagcagccgcgatagcctttggacctggtgtgttctgtggatttgtgatcggacacatcttcacttcatacaaacacttgtggtttatagctcgttaa

SEQ ID NO: 195103 - DNA, 675 bp, Arabidopsis thaliana landsberg
atggaggattttggtgacactggtctgttaattgaatatgagatgatttttatgcagatatatactattgaaatgcgtgatgtaagatttgctatgagcattcgaccaaggctgaggatagttggcgttttgattttagcggcatggattgggcttgtggctttgtttggtttgctaaaacctataaagaatggttgtactatgacttacatgtatcctacttacattcctatctctgtgacggatgatacaactcctggaagatatggactttatctttaccatgaaggttggaggaagattgactttaaggaacaccttaagaaacttagtggagttcctgttcttttcattccaggcaatgctggtagctacaagcaggtaaggatcctccttttcttggttcaatttctgagagctagaagtaaccccattatagtaatattatatgacttagatggtgccactataaaatcattagatattttcaattgtgcaaagccgaagttggaattctttaactagcagtttttgggtggaggcgttgtttctttaacatgtaaaatgtgttactcttgctgggaacttatcttctggtttcatataccatactccttatcggccctgtttttaattgtttttcactcacgtcaggtctgtggcatccgaatctga

SEQ ID NO: 195104 - DNA, 283 bp, Arabidopsis thaliana landsberg
atgggcggcctcgctgaccggaatcgtttgttcgtcgaaaatcgcccccacgttgctctcttcgagaatatgccccaggtcggcagacaggccgtcactgacgtcgatcatcgcatgcagacggcatcgggcgtgcagggtcaaagcctcgcggacgcggggcgtgaagtcgaggtgtcggccggcaatactgccgccgaatgtgccggtcgccagaacccagtcttccggccgggcgccgctccgcagaacggggccggttccggtcggttcgccgaacgcg

SEQ ID NO: 195105 - DNA, 60 bp, Arabidopsis thaliana landsberg
tttgtatacaaaggaaaaaaataaaaggagaccccatggcgggaaaatacgatcgtttgg

SEQ ID NO: 195106 - DNA, 152 bp, Arabidopsis thaliana landsberg
atggtgatgccggtgctgataaactggtggcaccggctgttcgcggtcttaacgatgtgtctggtcgagataccggcagtgcagctccgtataaatcattgtaagatggaggccgtgacagcggcggcggcactaacgatggagggcctgtg

SEQ ID NO: 195107 - DNA, 196 bp, Arabidopsis thaliana landsberg
gcgccgtgccagacactgcccgtcgtgccacccactgccactgttgacgcctcatccagcacccatcctatcccaaccctgcaccttcggtcaccacccgagtccacctctcccatcccctacccctccgccgcctgctgctccactcctctctgtggttgcagccccagcagtggtccctgctgcaatgccccag

SEQ ID NO: 195108 - DNA, 110 bp, Arabidopsis thaliana landsberg
atgatgagaagagcgaggaagaagtctcaaaaaaggcaacaagcagcaaagcccgtggcgggaagagagctgcacgaagctaagagattgccctgccgtgagattttcag

SEQ ID NO: 195109 - DNA, 422 bp, Arabidopsis thaliana landsberg
ctgttaaggtgtatgttcaagtcatcttgagcctttctctctctctctctctctctctgcggaatccgaattttgtaaagaaacaaactttgatggagatggccgagataaatgggtccatgcagctagtaggaaagcacaagtcactacctcagaccactctcggtggtggttctgcatccgaggcaccaaacaagcaggttagaccatggttacagcagttgtctccagcaagcaatgggattctgcatattcctactaaaatactttctcaagagacactacattctctgatgcatggcaagaaagcgacgcaaacagaatccgctccccagaaaccggcaaagccggttgtaaacaagaagcagcatgtccctcctccacaaaggtcagtgaaagcgatggaggaagtaaatgagtcg

SEQ ID NO: 195110 - DNA, 1342 bp, Arabidopsis thaliana landsberg
catttcctgtgttatatggaaatctccgaaccattgatcattcccttcttttggcgtcttctgttgatgaaaaatcctctgtggatgaccttgtaaacatgctttgtgcaattggcgttcaaaagctgtcagcacatgaaatcgttaaagctcatatattaccagcctttgaggcaaggagtacaggtgcagtggacggtttaatggttgattacttatgctttgtgatgacacatctacgatctggctgtcatatttgtctgaaggagaggaagtacattatttctgagttgagaagcaaagctctggtattatcaaattatgggttgaaacagctaggtgaagggtcaattcatttcggtgaagaatatggaaaccaggtcaacatgaagaagcttaccaaaaacctggatatatcatggcatgtggttgatggtacctacttgaaacagccagcatcaaaattttatgcatgcggattgaaggagtggcgggaattttttcaagagattggaatagctgattttgttcaagtagttcaagttgaaaagagcattgctgaattctattctgtttcacactgtgaaaagtatgatatcaacttgttatctcctgatttaactgttaaagactgggaatccccggaactagttgatctcttgtctctcttgcacaaaagtaatggccgtaaaggttgcaagtatcttttggaagtccttgatagactgtgggacgattgttactatgacaaaacaactgttaactataactcgggtacgcatggtatcatcagatcatcagaatcttcatttatgagggtaatttgtgattctctatggatagtttcaagcatggacagcaaattgcatctttcaaaagacctctatcatgattgtgatgatgtgcagtcaatacttggcatgaatgctccctatgcagttcctacggttagtttggttttgcttacttatgttataatgtgcttggtactacaactattagttctaatatacgcagtgaataattggcttttgagtattttcctatggacttataaaattacatggatggtcttgaaatttatttagaggtgtgggttctttgtgggtcggggtgttgtcttaatatcttaaacttcgctacaatgtcttactcagcggaggagttctttcacctatttgtttaacctctcttttttcatcctctctattggggcaactgtgtaacaggttacaagtgtcaagttacttagtgatattggttttaagaccaaagtttccctcgatgatgctttggaagtcctagaatcttgggtacactgtggagactctttcaaatcaag

SEQ ID NO: 195111 - DNA, 176 bp, Arabidopsis thaliana landsberg
cgaggattcgatcagtgataatggagataagtctcgagaaagtctgcaataatgggcaagaaaaaggtggaaactttctatttgtgtccccacgattcatcaagcaggctgcgacaaagccatttaaagattgttcagactcctatcactatcaatgggttctccgacaaatgtaa

SEQ ID NO: 195112 - DNA, 13 bp, Arabidopsis thaliana landsberg
atgaccaaggaag

SEQ ID NO: 195113 - DNA, 532 bp, Arabidopsis thaliana landsberg
atgcagcgacacgcgaatcagctcaacctggatcgtggcctgtaccagctcaagtcctactttgggcttcgaccagcgctcgatcaaaagacctacctgcccgacgacaaaaacttccctctggtccaagtgctgaaacctgtcccttgggacacacaggataaccccatcttctacagcgttgatgtggagtggatcgagaggagcttcggacaagtcactgaggttggaatctcccttctggatacggttgatattcacggtatccctccgggacctcatggggaaaactggatcaagtacatcaagtcagcccatctgcgtaccgccgaataccaacaccaccgtaacacagagttcgtggtgggatgcccggaaatgttcctcttcggcgagagcgaaatcgttccggatgaggaaatcgggcgacgaacagactacttcttcgttacaccatatgatggaagcgaggacaaaaaaagaacggaccttcccgggcacaagttaggagcgcgctgcatcgtcctcgtcg

SEQ ID NO: 195114 - DNA, 144 bp, Arabidopsis thaliana landsberg
atgagtgtcatgctctacaacctgctggggttgcgatcgagcttaatgacgaggagatggcggagccacatcaagaaccggccatgcctgcagagtacactcaagcgaatatggatggctacatctctaggtcattctactgag

SEQ ID NO: 195115 - DNA, 252 bp, Arabidopsis thaliana landsberg
atgccgcagatcccagtgggtccgccgtcagagagtaaccggaatttaaaggttagtgctctcctctcgccggctacaaatgattggaatgtgggagccattcgtcagcatctacctcaccttgaggccaatatccggcggctgatccccagttctaggaagaagaaggatgctttggtctggttgccggagaaaacaggagtctactccacgaagacaggctatattctctccaaattgaactcagagacg

SEQ ID NO: 195116 - DNA, 201 bp, Arabidopsis thaliana landsberg
atgctcaagcacgatatcgtctacctgacggaagatgcctcccacgacgccgctatcgaactcatcaacgaggaagccttcggccccggccggcatgtgcgcgccgccgcccgcatccgcgagcagggcccgcacgacctgtcgctttccttcgtctgcaccgatgacagcgagaccatcgcctccgtgcgcatgacgccg

SEQ ID NO: 195117 - DNA, 488 bp, Arabidopsis thaliana landsberg
gttcttatgattctgtatctaattgctatcttcttcatctacccagttcgaagatcttctctgcttctgaaattggcactagtagctctccacctcgtctttatcggctttctcttccttttcgatgctgaatttattgagaaaactaaacgagatccatggttattactccttatctctctctgcttattcaattactgtatccttgagcttaatgttgattactctgtgattctttctctgataggtatatgggctgttatatcttactgttttctgcaacgcttctgcagtattttgtaacttctggctcttcacctgggtatatctacctatctatgcctaaatgtgtgtttcattttgattctgaaacctaaaaaatgggtgcttgaccttcttccttgtcttttaggtatgttgttgatgcaatgagggatgtttgcgaggctagtgcaatgtatagaaacccatctacgacctcaatgtaa

SEQ ID NO: 195118 - DNA, 697 bp, Arabidopsis thaliana landsberg
atggaaaaggaagataacggatcgaaacagagctcctctgcttctgttgtatccttgagaagacgaagaagagtggttgagccagtggaagcgacgttacagagatgggaggaagaaggattggcgagagctcgtagggttcaagccaaaggttcgaagaaaggttgtatgagaggaaaaggtggaccagagaatcctgtttgtcggtttagaggtgttcgacaaagggtttgggggaaatgggttgctgagatacgtgaaccagtgagtcaccgtggtgcaaactctagtcgtagtaaacggctttggcttggcacgtttgctactgcagctgaagctgctttggcttacgacagagctgctagtgtcatgtacggaccctatgccaggttaaatttcccggaagatttgggtgggggaaggaagaaggacgaggaggcggaaagttcgggaggctattggttggaaactaacaaagccggtaatggcgtgattgaaacggaaggtggaaaagactatgtagtctacaatgaagacgctattgagcttggccatgacaagactcagaatcctatgactgataatgaaatagtgaacccagcagtgaaatcagaggaaggttacagctatgatcgattcaaattggataacggattgttgtataatgaacctcaaagctccagttatcaccagggag

SEQ ID NO: 195119 - DNA, 1074 bp, Arabidopsis thaliana landsberg
atgatagatgttcaaggtgtgtttttttatttgtacaatgagattaataaatcatttatttttagtcaagaagcatcgaagcaagagaacgaaccatttgaaagactcataaaccaaattgagtcaaacaaaggaatttcaaagaagtagtttggtatggacggatctggtaaaccggtttcggtacgattgtctggttatttttggtttaaaattgattgggtatgttgcagaagctttgcctcagatggcaggtctctccaaattgatcatccttcgatattattattgatacagaggaggaagactcagaatcttcatcctcaaaccctagattccttaacgaaatggcgatggagatctcggtagatctgataaaccaactcaaggtctcgcttcgaaaggaggccaagctcacctccgtcgacgattgctcggactcatccttccccagccttcccacatccgaggaggcaatcgcagaacttgatgcttcagctccgtaccttcgttgccgaaactgcaaaggaaaacttttacgaggaatcgagtctctgatctgtgtcttctgtggaaatcagcaacgcacgagtgataatcctcctgatcccatcaaatttacttccacttctgcttacaaatggtttctcacctctcttaatctcgatggatcggtaaaagtcgatacctttctcactaatttgtaattacttgttttcctagctgattgtgtattagtcagatgtagaatgtggtgtgttgtgtcttcaaaaaaacgaacttttcatctgtaggagatggtagagccactaaaggaaacggatgggtcaagcagaggagctactaaggcaccgccttcaaaaggaattgctttgtctaagtttcttgatttggaaatacaatggtctgcattagaggagaagtctgatgatggacaatcagtacagaagaaaaaccctctgaatctaggcgggattaatcttgatgattatttcgttgagcggagaggagatctttccaaagtggagcaggcagagagtaaacctgtggaggatgatgattttaaggatccac

SEQ ID NO: 195120 - DNA, 1105 bp, Arabidopsis thaliana landsberg
cctcattccacacgactgcacacccgagcataatggaacctatgtaagtgagcattatgagaaggtgtatctaatagatggaatacctttggacattgttggtgttggagacatcaacttgaagttgttagaatgacttgtgtggaaaataacaaaggtgagacatattccaaaattgatgagaaatctgatatttgtaggacaacttaatgataaaggacatgatgtcaattttggcggtggagattggagagtgactaatggttctatggtggttgcaaaaggtcttaaaaggtatcaagaatgcaaagaagactaagttgtggcagattggggaatatgagcgacaaaggtataagctcatgatagcgaatggttcacttccagatttgaagatggcgaatcaacatatgtgtgtaagctgcatgcttcgaaagcataagccggtttgtttcccaatgtgatggcaagaagaaaaaatctgagactctggagttggtacatagtgatgtgtccggaaaagaacagctggtatgcaagttgcaaaagagtttttatgggctgaaataagctccaaggcagaggtataagaaatttgatagctttctgagttcttgaggtgtcaggcagaccattgttgttatttgaagaggctgaaggagtcctacttgatattgcttttatatgtggatgacatgctgatagcaagtgcagacttgtaggagattgacaagctgaaggcaactctctcagaagagtttgcgatgaaagatctgggagaagctaaacaaattattgggatgagaattagtagaagcaaggagagtcttttgctgtcaccagaggagtatgtgaagaaaatcctcaagaggtttaatatggatgatgcaaagctggctagtactcccttggcgagtcatttttagttatctaaggataaacgagatgggatatatgatatggttccatatgcttccgttataggcaaacttatgtacgagatggttggtacaaaaccagatgttgcacatgtagcgggagttgttagcaggtttatgagcaatttgggcagagatcattgtgatgatgttaagtggattccaag

SEQ ID NO: 195121 - DNA, 71 bp, Arabidopsis thaliana landsberg
acaagttactagcttgcttccaagctcatactattgaacaccatcttggctctccatcaaccaagaactaa

SEQ ID NO: 195122 - DNA, 134 bp, Arabidopsis thaliana landsberg
actgaaatgacaactgctgaaagagaacttgatcaaaatacaaattttgattggaaccgtatacaagagagtggaaaagaattggtgccagtttttggacctggatataccggacttgtcaatcttgggaacag

SEQ ID NO: 195123 - DNA, 469 bp, Arabidopsis thaliana landsberg
aagacaaagaaggtgaattttcaaaaccaatgcagcggtattgaggcacccgcgcgtggcccggctaaaccatcaagtgcgagggtcacgggttcagccgcggggacagacgtggcagttggcgtgtctgaaggcgagctggcagtaatcatgtcagcaagcgcacgaaagcggcgcgccaatcgccaaccaggctttggcctcacttgcaggctcagatcctcccctgaggtgggcccgggggcacgtgtcggtaccctgaaacatggtacccattactacagcatgaagacgcggtgcccacgcggctatctctagtcgcgttgtgagcagcacccgacccggccacgtggatggttccagggccgccacgtggccagagaagacaatatcctccaaagtatcaacagtgggtccagacccccattggaaagtatcggacccctgtatatatggaccggacctctgg

SEQ ID NO: 195124 - DNA, 10 bp, Arabidopsis thaliana landsberg
atggctaaag

SEQ ID NO: 195125 - DNA, 74 bp, Arabidopsis thaliana landsberg
ctcagctcgataacctaactcgacaccctctaaacaaaaagttacaaaacgaatataataatgtcttcggctga

SEQ ID NO: 195126 - DNA, 139 bp, Arabidopsis thaliana landsberg
ccggatatttgttacgtacccatcatctaaagaggatctgctactgcctgggttcatcgcggacgtgggttttcttgccaaattctccgaccctttcgtagtctgccgatcttacctgcacctccgatccccggtcccg

SEQ ID NO: 195127 - DNA, 64 bp, Arabidopsis thaliana landsberg
gtattggagtactggagtaggcatcagacctttttgtgagtatacgagtaccaccaactgctga

SEQ ID NO: 195128 - DNA, 207 bp, Arabidopsis thaliana landsberg
gcatgttcgaagaaagagaagacaacgaagaaagagaagatgattcgaagaagaagaggatctaatgaagagaagaggcgaagaagaagttgcagaacaagatcgaagaagaagaacttgaagaagaagatcgaattagatcgaagaagttcgaagaagaagaagttgaagaagatagatcgtagaggttttgtttggatgaaatga

SEQ ID NO: 195129 - DNA, 825 bp, Arabidopsis thaliana landsberg
gcgttagccttaggttccaatctggcgaagcgtgggctttgtgaaacagcgagttgcagaagatgcggtttgtgggaggatgagattcatgtcttcgcttcctgtccttttgcagcaaaagtttgggatcttgcacctgggttacacaaaccctctcatgctgccccggattctgttacacatctattgtatggagcttgtttaatgcggaatcttcccccaacgggaattggctcaactcctttggctccttggattttctggaatctctggaaagcgcgaaataagctactgtttgaggataagcactacacagaacatgaaaccatcttgaaagcaatcaccgatgcacgagaatggtttaaagctcaaactttggttataaagataccaaaacccaaatttcccgccacagcgcctcggcgaaaccttgtgcaacattgtgttcatgttgacgcagcttggctagcttcttcaagacggtgtggaatgggttggacgttcacaggacccgacagcaccacaatctcctctttcacagcgaatagagagtttgtggcctctgctcttgtggcggaagcactagctatgcgatgtgcgcttacaatggctaccgatgatccggatatagcctctctcactgtgatgtctgactcccaggtcctcatcactatgatcaactcgaaggagagtactacggagcttaaaggaattctccatgatatagctctgcttactcttctaagagcggcgaatgttttagccgattctcttgcaaaatcagccttagtggctttatctgctcccctctctgttggaatgtaa

SEQ ID NO: 195130 - DNA, 436 bp, Arabidopsis thaliana landsberg
cgaggccgagcgcttcgccacgctcgcctggctgcgcggcgctccctacccggccgagtcactggacaaggcctggcggcagctcgcatacggcgcccaccacgacgcgatcaccggcaccgagtccgaccaggtttacctggacctgctggcgggctggcgcgaggcgtggcagcgcggcgacgcggcgcggaaggacgcgaccggattcctcgccgcggccggcggcagtgactccccgggcggcgggtccgggggccccggcggcgtgacggtgttcaacggcctggcccgcgcccgcgacgggatggcgaccgtgaccgtgcgactcgacgagccgggcacgccgtggctggccgtgaccggtcctgacggggtggacgtgcccgcgctggccgagcacgtccgccgcagcggaaacgggtcactcgaagag

SEQ ID NO: 195131 - DNA, 139 bp, Arabidopsis thaliana landsberg
atgggtccgatccaataatggccgtggacgagcccggactcgcactgggcctgggttttggaccccccagcttgggtccctgatgttcattgagcccagcgtgaacagttgctactacttgctccacgtacgccgtgtg

SEQ ID NO: 195132 - DNA, 155 bp, Arabidopsis thaliana landsberg
tatattttaaaatctctcaacaagcgatatttccgagacattaccaagccttcgtcttccaacgccggtgtagctatggctcgccggcgtcggatagtgtcttttctttgctgccttgttcctctcttcggaaatcaaaactggtttcgtcttaa

SEQ ID NO: 195133 - DNA, 542 bp, Arabidopsis thaliana landsberg
atgggagcttccactataaccgatgtatatgcttacggtgttttcttgcttgaagtagcctgtgggaggaaacctgtggaattcggggtttgtgaatgctggaagaaacgatttctgatcaaatgggtttgtgaatgctggaagaaagattctttgcttgatactaaagatccaagattggtagacgaattcgtacccgaggaagtcgagttggttatgaaactcgggctgctatgtacaaacattgtgccagaatctagaccagcaataggacaagtggttctttacttaagcgggaacttaccattgccggatttcacaccatatacacttggaatcggctcgtttaccccggtagttgtcgatgcagcctcacttaccgtctcatttacttcgaggaactggtcagcgccttcggcctcttcttcctcagccaataactcaaaggatcatggacaagcattggaatcgaagagctcattaaacgtagttgcggaatcagaagacatcgaatctcgtctctctaggctaaacagtggcag

SEQ ID NO: 195134 - DNA, 455 bp, Arabidopsis thaliana landsberg
atgatgaccgcgtcaaaaaggtgcgtcacatcgtttaaattcgtatccttttctccttcccctttctttctcttgctacagggaccgggaaagggatactctgaaagggatccttctccgcgaagaaagcgggtcccgagccctcctactgatcaggggttcgaagactggcccctcggaagggttcgacagctgcctcagagcactcgggtccgcgcccattactgattaggggttcgaaggctggcccctcggaagggttcgacagccgccccagagcactcgggctttaggctcattactgatcagaggttcgaaggttggcccctcagaagggttcgacagccgcctcagagcactcggctccacgcccactactgatcaggggttcgaaggctggccccccgaagggttcgcagccgccccagaacacgcagagcgagggatgactctgg

SEQ ID NO: 195135 - DNA, 392 bp, Arabidopsis thaliana landsberg
caaaaacctaacttgttatccaaacaaactgaaatatcttggaaccttcttagttttgctcgagaatatcaaataaagaaacacatcagaccaagaccaaagactggggtgagccattataatgcacaacaacaacgatgccaaaacattcaataggcctaaagacgaaatggtcgtttaaatttgctcactaaagtttctagtttttgaaattactaattaaatgtataataattatatttcctgttttcatgcatataagatgttgacaatggcaagatggatcatattccgacgacaattaatgttgaaaatttatcgaaaattacacacgaccaactacattggaagatcgagcgattggttgagatctgtcaaaatattcaacgaag

SEQ ID NO: 195136 - DNA, 168 bp, Arabidopsis thaliana landsberg
accataccgaggtatcaaaggtcttatgaacaacgaaaaagtttgattgagtcttttgatcatgcaattgccatcaatagttatactcttaaagaccctacaacttttggtcgagaatatatggttgagagattcaacctagcattttacatgaatgtaacatattaa

SEQ ID NO: 195137 - DNA, 452 bp, Arabidopsis thaliana landsberg
atgagaggagaaccagaggtgaatgctccacagcgtgaccgggatatggtagttccgcctcactatccacctccgcctccgccgcatcctatgcaggctcatgtccaagggacgacgtacttggatgccatcaagtatttaaaagacgtgggcatggagttcttcggtggtaagtctgaccctattgctgcggataactggaggaagaaatgggaaagaaatctggattatgttaggtgtccgtaagcgtaccacaagaagttagcaattcagtccttgaaggatgaagctcaggtatggtgggataagattgtaggccagacgtgtgaacaatatgagtagacttgggaggatttcaatgcaaaattttcaaggaagtattttcctagggaggcaatgtactggatcgagcacgagttctcaaacctttgtcagggaaatatgaccgttaa

SEQ ID NO: 195138 - DNA, 118 bp, Arabidopsis thaliana landsberg
atgaatcgtcatgatttcatgaacaagtcagctttccggtgtcgacgattcaaatcgattttgtgtttccgtcggcgaagaagaggaaaagagagagaagaagaaaagaagaaaacgc

SEQ ID NO: 195139 - DNA, 121 bp, Arabidopsis thaliana landsberg
tccggtgaaggtccttaagatatttaagtttgaagaaatttgtgatgacaatgaagacataaaggagcagatcgagcacgtcaaacacttcctaattaaagcaatgccaaatcttgatcag

SEQ ID NO: 195140 - DNA, 314 bp, Arabidopsis thaliana landsberg
atgagttcattgagaaggtttggttgtttggcttatgtacacgcagatcaagggaagttgaatcctagagcaaagaagggaatattcacgagctatcctgagggtgttaaaggatataaagtttggctacttgaagaaaagaagtgtgtcattagtagaaacgtgatattcagagaggaaatgatgtacaaagaccttaaaactgattctcagaacagtttctatgaagaagtcatggagaacataggagaaggttctaatccgctgatatctaatatcacagatcaaagtattacagaacaagaaagcgttga

SEQ ID NO: 195141 - DNA, 507 bp, Arabidopsis thaliana landsberg
atggaggcagttctggttgtggccggcgtcatccgcaagtggcggctcggattcaacggtcccgttccaacagagcttgcgttgagcgcacaaatttcacttcggcctcgcgatggcgttgtgatctcagcgacgaaacgataatgcgatggccctcgcggcagggaaaagatcgtttaccaggatttgaacctggctggagagaatgctgtcatcggcacatccggggtctcgcccagcatcgcctgcgtcatcacacgggcggtcaccggggccagcaaaattccgtccctatagtgcccggtggcatgccagcaattcgcacgctgcgcaggccccagaatcggcagtccatccggagtgcccggtcgcaatcctgtccatgcgtcgatgggcgatggaatcgtaccttccggcagcagccggagcgcagcctccatcaatcgtctgactcgtgcttcctcaacgacatcatcgaaccccgcgtgctcaagcgtcgctcccacg

SEQ ID NO: 195142 - DNA, 404 bp, Arabidopsis thaliana landsberg
atgacggagcagattcgccaacccagcttcgtcctcgatgattgggtgatcacggtcgtgagtgtaagaccaatggaagggcatgtttcccgtagaccctccatctgaattggacgtctgccttacctcttgagactggtttagactttgaaaggaagacctacccccacctcttaatcctcggcctccgctttgggacctaccagacgatcgcctgtctacggacacagtgccctctgggttagcagccgtaggttccaccctctcttctcttgaagggacaactcctgatcaatcacgatcagttcagccgccgtcagcacgagcagcttcagacggcccagagacctgagcgacttgattgttgtctgctagaacttctgcagcagaggtcccggtgttag

SEQ ID NO: 195143 - DNA, 80 bp, Arabidopsis thaliana landsberg
cgagtacggacgaactacggagtactgtgggcagagctgttctagacagaagcatatcaaatatgaacttgcggacttgc

SEQ ID NO: 195144 - DNA, 646 bp, Arabidopsis thaliana landsberg
atgggattgagcccactcctcagccatctttacaagaatgacgacgtaaggtatgtgcttatgtgcagcggccggctctgatacattcagatcaatggtctccacaaaactgccgttcattaaataattaagaatatcagtaagtactcagtcgtccatccacaaccataatgttaaaggatgccagaacaacataaagtgagaggatatgagagcagtggacctcttgagttcaggccatggattattcaggcggaggtcgtcaagaaaatgatcaggttttgagtcaattatggggtgctcctgataaaaaagaaaagaagagagcttagcatatattctcattggccaatatcctaaccacggcataccacaaagtaatctaaactttatcacaaattgggtctagacaggtggtattaattacctttacagagatgcgaacaaacccagcaaggccataagagcgaaccaaaaccaacttaacgtttgcatctcgacagattctatcaagtttcaacattgaatcttccaccagctgcaaccaatcaatgtcgaaaaggggatgaaataacgaacttaaataacaataacacaggaaaaagaagcctaataaagcaatatcccgtgaagaggacgaggaaaa

SEQ ID NO: 195145 - DNA, 316 bp, Arabidopsis thaliana landsberg
cccatccaccacatcgattctccccccaacatcaaaggccggaggaggaagaaaggttagggagtcggccatgggatgcttttcatgctgctgtgtgacacatgacgacaaccttggcaggaggaagaagcatgaccatccctatgttcctatccctgctcatgtttataatctttggacctagccggttcccagccccaacccctgtcatctccactggcagagctcatccaattgcagtaccggccattcatctggaagagctgaaggaaattacaaaaaacttcagcagtgatgccctcattggcgagggctc

SEQ ID NO: 195146 - DNA, 388 bp, Arabidopsis thaliana landsberg
atgtcaccacgatgtaatctcgatgatacaaccgatgttgcagaccataaggagtttgcagaccgtaagaggacttatgaagtccaaggaatgaacatgaccggcttcttcactggtagctaaaaacattccattatcatttgttttgatatagtttcatttttttcaaattttgacgatgagattgaacattccaagaacagttgattttactctcaaagagctgaaaacacttggtgcaaagcagaggtatcctttcagggatcaacaatacaatggtaaattcccgattattaccttcgacgagtatatttcgatagcactggatgcacctagagtggttgggatatatccagagatcaagaatccggttttcatgaatcagcaa

SEQ ID NO: 195147 - DNA, 195 bp, Arabidopsis thaliana landsberg
gtgtttcaacctggaaaaaacagagtgttagattcgataatcttcacactctgaagagtggcatgaagaagaagaggaaggagaaggagaaagatgattactttggtgacggatttcttactagacttgcccatagatcctgatcacaagcgaaactggtgtagcagctaccagctaggtttacgagaagcttaa

SEQ ID NO: 195148 - DNA, 263 bp, Arabidopsis thaliana landsberg
gtctgaaatccggacttgtagagaatataatgaagaggctcccagtaattgaacacttcatcgcagtcatgaatgatattagaagtcgcgctcatgtaacgaagataacaaagcgctataaacggcaagaaccatcggagaccaccatcctccgcatcaccgccattagatcggccaggtttatcggtcttcgagtaagatttcgtagaagacgaagaagaagagtcagatacaagtggacgcctctgacgcgtcgtcgttag

SEQ ID NO: 195149 - DNA, 252 bp, Arabidopsis thaliana landsberg
acgtcgtgatgatgggcgtaaggaaaaggttcgaggatacgaattggacaatagatgggttgtcccttacaacccttacctgcttcggctcttcaactgtcacatcaatgttgaggcgtgcgggagcatcaaggctgttaaatacttgttcaagtacatatacaaaggccatgatcgtgcgtctgttgttatgagagatgcgagcaaggcagatgatgatgtagatgagatcaagcagtacagagatgcaag

SEQ ID NO: 195150 - DNA, 186 bp, Arabidopsis thaliana landsberg
aaactaaaactaagtatcttgaacatacagaattcaatgcaaagagataaaaagagtcttaaacagaacacaaataaatcagattcctgttttcggtatccaaaattttccattttgcatcgcttttcctcggattgtgagtgggagaaagaattcaatggcaaacaaacagagaaaattgaaaga

SEQ ID NO: 195151 - DNA, 216 bp, Arabidopsis thaliana landsberg
ggcatgctgccgatgatgctcgggcagatgaacatgccggaactgcagaagcagatctccgacgccgccaacgcctatctcgacgacccgaagagcctcgaagtgtcggccaagccggcccagccgatgcccttcccgcagatcatgggtgctgcgatgggcaacccggccgatctcgccaagacgctcaacgtgcagatcaccgccaaccagtga

SEQ ID NO: 195152 - DNA, 27 bp, Arabidopsis thaliana landsberg
atggaagtgatcctagctgataaaaaa

SEQ ID NO: 195153 - DNA, 182 bp, Arabidopsis thaliana landsberg
atggcattctttgcctgtccatattgcgcatatgctgaaattacagcattccacgtgatggaattcttctcgggcatctcattaaatgttctgatggcttcatccaaacagccacattttgcatacatatcaagaagggcactgcctgagaacacgctggacatgtgccctgatgttgtgag

SEQ ID NO: 195154 - DNA, 231 bp, Arabidopsis thaliana landsberg
atgaagataaagcggtcaaagctaaatcaaacatacaacaacagacaaagagatatgaaaagctgccgtatgagaaaggtccccaacaaagccggcaccgacgaactcacacgaacgaacaagacgatacgagagtcacgagaccgtatcactgtcctcttccacacactgtatgaacataataaaatcagtttatctcaactaagaaaaatgaatcatcacttatctcac

SEQ ID NO: 195155 - DNA, 444 bp, Arabidopsis thaliana landsberg
tacaagtgctcaacctgtgcccaaccttcttacatctacgacaccttggcctaccaactctgttcggctgataaggtggctgcaccacgcacacttaatttcattcaagtcgagcaaaccaccattgcgtttaccattgcacaccttccaacggcatctcattgaaagtaccctgtagtcgattcataagccagccctttatgattctctacagacttcgcatgaagattattcgcgtcaagacacttcttgaagaaagtgtagtattttgaatgaggcatggaccaccacatgaaatgatggtttttgtcaattcgtacggaagctaatgttttctcagaaagaaccgcatctctcccctctctcccagctagcaagaagttcttcaacgcatcaacaccatcttctccaaccgtgcttacgatgatctccatcaacggctga

SEQ ID NO: 195156 - DNA, 562 bp, Arabidopsis thaliana landsberg
aaaagtcaaatcccatcaagaaaacaaaacagtagcttcttctttaatatctatttcatctactccatcttctttacctcgaaaacggaaacacgatgtcttccctagcttccacggggcagatgttcgcaaaacctttcttgctcacatcctaaaagagttcaaagggaaaggagtcgttccattcattgataatgatatcgagaggagcaagtctatcggtcctgagctcatagaagctattagaggatcgaagatcgcgatcgtcttgctctcaaggaactatgcttcttcttcgtggtgcttaaacgagttggtggagatcatgaagtgtagagaacaattgggtcaaacagtgatgaccattttctatgacgtcgatccaacagacgtaaagaagcagacaggagattttgggaaggtcttcaagaaaacttgtaaaggtaaaccaaaagaggacattaagagatggcaaaacgttttggaggctgtggcaacaatcgctggggagcattcccgtaactggttagctttctggatttatatttgctctgattcataa

SEQ ID NO: 195157 - DNA, 74 bp, Arabidopsis thaliana landsberg
ttatgaggaaaggaatctgaatattttggagaaaaggttgagaaaattacgaaacaattctccatttttcgagg

SEQ ID NO: 195158 - DNA, 59 bp, Arabidopsis thaliana landsberg
atgactttatgtgaaagtgatagctatgactctgacttggctgttaagcaaaaatcaag

SEQ ID NO: 195159 - DNA, 588 bp, Arabidopsis thaliana landsberg
atgattatggtgcatacacttgttgtgtgtgttgtggctacttttgttcacacaagatgtgcattgggcacagatgtatgggatggcattgaactcgagggagtgcaagaagatgaagatgttgagcctccgttcaaagggatagctggtggaacaatacttcacttttctcatggttgtcaactggaatttaagacaagtgaagtttacgaccaagaaaagttttgtcaagcatgtgcccttccaatctacgagaagaatttttatgaatgtgtagaatgtgacttcatcctacatgaaagatgtgtagaggctccccgtaagaaggtccatccattacatccccatccacttatacaaaagtttactcacgtagaaggcggcttctcatgtcaggcgtgtaatcgcatgagtaatagttttggatatgagtgtctcatggaagattgtggctacaatctagatgtagtgtgtgcctctatttctgagccgtttgattatcaaggccatcaccaccccttatttctgtctttagaccccaaagaagagccaatctgccacatttgcaggtcaacataaattcaaaag

SEQ ID NO: 195160 - DNA, 42 bp, Arabidopsis thaliana landsberg
atgaagacgtgtcgtaaagacttacttggatatgacttcttt

SEQ ID NO: 195161 - DNA, 438 bp, Arabidopsis thaliana landsberg
cgcctatcctccttcccgtgcccgcgagcggagtcgatgtcatgggttttctgcaggacgcgccgcagttgccggatccgttgcctaccgacggattgctgcaatgcctgctggcgcaccggttgcccgccgcccggcgggccgtcgtcctgcccgatctcgaggcactggccgaatacgccctgatggaatggcggcgacgcgcggacacgccggccgggacacccgtgcacgtaccctgggatgcttggggccggcgcgtggatcgcatcacgctgaccacggcctggcgcgagggccccgccatcaccacgcgtcacggactggtcgccgcgggtcatgataccggcgccacggcacggctggaacagttcgtgcgcgtgtatctgtatcacgtcgccagcgagatcaacacctgcccgctggccatgaccgacg

SEQ ID NO: 195162 - DNA, 70 bp, Arabidopsis thaliana landsberg
aggaaaaaaaaagctcagcgaggataatgccaatggaacactaatgtccaagaaatcttcttctccgtga

SEQ ID NO: 195163 - DNA, 71 bp, Arabidopsis thaliana landsberg
atgagcgatgcagaggggagaggagacatgcgtgacggaaaagagactcaaaaacgacacacagttggaaa

SEQ ID NO: 195164 - DNA, 270 bp, Arabidopsis thaliana landsberg
atggtagctgtctattctgcaaattgtgtcgatcgacaccctaatggtgtcgttcgacactgtcgtcgaaatttgccagcagtttgttacgttccatcttgtagttcccttgtcacaagaaaaagaagcaagaaaacgcgtgagtaacaaaataaagaaaataaacacttaggctaaattctacacttagtctaatggtgaatcacagagaacttcggcaacggcgatataagtcaaattaatcctaagaccactctctcaaataaagag

SEQ ID NO: 195165 - DNA, 1172 bp, Arabidopsis thaliana landsberg
atggaggtttccatgaaggtggaggaaccacaaacagattccatacgggtcaggtctgtcacgcaagcttgatatatatgagagtgtgtccctgaattcctgataattcagtaacactgggtaagaggaaaaggaatatattcctctgtaagagtacatgattctttaccaaagataatttagtttaataccctaatttttctttcataaaaagaaaacaaaactgacctcttcggttgggttgaacacaggagcttcctcaaggactttggtctcagacactttgaggggccgtcttctccgtacctatgaaaagcattttttcatactttagtaatgaatgtgaaaggatgaacacacaatcatgatacctatactctcatacgtcttaaaggcatagtagacctacccgaatcagcacatcaagctctaaagaattcatactaaatcacttatgcaatccacaacatgaaatttccggcttaactaacaacttaaacatcaatcaagtataatgtctattagtagtaatgactatgcatatttcccagaaatatctcctctttgaactcaaagaatgtttataatagactaaagaactaaaaaataataggaaaacataactattttgataaaaagaaaaggaaaagcattcctccacaacaaattggctcttgctctaataaggatactcaaaagaccctcctccaacaaggtgtcgaaccattgtcctcacggctaagctcaaaattctcaaataactatattccctttactgctcttctcaacagcatacaaagctaaaaactactctatatgaagatagagaggaaagaggtagacatagtatgagacctcagtttttttcggccttaaggcctctgagctgggaattgtgtgaccatgcactatccacggtcggcttttaagaaacatattgcaactatctttatcatctgtgccgaatccagttgtctgctcttgtctcgacacggacctgggactttctttgtctcggggtacattcctcagcacaaacgatgtttgagatacaaaacctggcggagcagaaattgtgtccatatttccagatttcaaatacgttgatacaccttcaatgcccattaaaccttacagccaccaaaaggattgatttcccgaagacgaaataa

SEQ ID NO: 195166 - DNA, 310 bp, Arabidopsis thaliana landsberg
caaccacacttgtaagtttggacgtaattgttttcggacgtcgaaaacaagacataacgtaagttggtaaagccgcggctaccgatttgatcataacttctttcccgtctttggatagaaatttggccgaccatccatttattctagtctgcaatcgttctctaacaaaagagaaaattttagttttagaaccacctaaactttctggtaatccaagataagaacccatcccacctaggttagtaatgcccaaaattaaatgaatttccgctttaatagactcatcaaccttatgaacaaactgaattga

SEQ ID NO: 195167 - DNA, 355 bp, Arabidopsis thaliana landsberg
atgaaaggcacagagaaaatttttaatccttttattacagatgcaaatagttggaagaacgagaattcaaatgaatggaagacatctaataatgcttcatcaaagcttgacagtggcaagagggcaaatcccacacataaaattgtgcagccagataggccaataaacacgggctatgcttctaatcaaggaggtgttgaatatatgatatccaaactaaagcctcaccgtgaagccgctgctgccattctcaattcgtatctgatcccttcacataagcctaaaccttcacagcgaccattgttccgaaggtcacccgccagcgctcatacaagatcacctagtgcgatcaacg

SEQ ID NO: 195168 - DNA, 329 bp, Arabidopsis thaliana landsberg
gctcctacgagtcaacaacagcctcctacttgtcaacaaaaggctccttctcgtcaacatcaatctttgggtcttcaacaacagcctcgtcaaacggagcaacaaaaccctaataatcatgaagaggaagatggggtagaagattgggaagaagatggggaagaagatggggaagaagaagaggaagaagaagaagaccctaattcccccgaagaagataaccctaatgtcgactatcaagatctgttggattctttactagcccttccaggtcgacaacatcttccacttctgtctgaaaagcctatccctggggtcgagactctctg

SEQ ID NO: 195169 - DNA, 346 bp, Arabidopsis thaliana landsberg
atgatgattcttggatacatgagtgagaatctgagaccagccgttggagtagtgtgtcttaaagacgcctttggcaagcgctgcttagacttccgaagcatagcagcaagagaaaaagagatggtcccgtgttttaatgcagtggctacataaaaatgcattccctcaatgctcctctgtcccacttaagcttacgagcaccagtggcgagacggtcgtgggctgccagccatatcaacactttttcttatacgacattacactttttcttacgagtgtttatattttattgatctgcaatgtatctgttcgtccatgccaaatcaaatctatatctatcatgtaa

SEQ ID NO: 195170 - DNA, 108 bp, Arabidopsis thaliana landsberg
cactgcttagccattgatctcgatctctcgttgcaattcaggttttggttctcaatccgctttgtcaatggctataagaaacctacctctcatctgatacaccgtttc

SEQ ID NO: 195171 - DNA, 252 bp, Arabidopsis thaliana landsberg
atgtgggttgatgaagaaggaatcaaactggagagagacaggatagttgaaatggcaaaggtttacgttagagtttgtttagagatgtatggtaacgtggtatggaatgcaagagagttgctgcaaactctttgggatgactttaagaagtgcgaagaggtgtatcgaacagcggttatctctttgtcgaaactggatgatgttgaaggtgcagaggatatatatggagaggggaaaaaaaaagaacagaac

SEQ ID NO: 195172 - DNA, 452 bp, Arabidopsis thaliana landsberg
gttcatcatcgcgtgtatatcctaatagagtgtgtaaacactgtattttatcttcgtaaggtttgtcagctctggcaataaaatacttatgccaaaatttgtcttctttaaattccttaatgaatgaccaataagattatgttggatggaaaatccatttcttcaaatatcttcacagctagatgacacttgtcgaaatccttttggtcgaatgaagttgggcgtaaactttggcgttgaaactcacaaaaaccagtcatcatatctgttagcgttctctcaaaagattgctttctttgacttccttgtgagccacttgcaaagtcacacataaatatcccacaggtctttgtaaagtacttccacgtcttccacaacctcgttgtgaactctttaagcagaaatctggattggataaactgatggagaattttggcgagtatattcgttga

SEQ ID NO: 195173 - DNA, 270 bp, Arabidopsis thaliana landsberg
gacaaattgaatttagggctttctcgcaaaggaactagatccaagagaagtgctagaggtggaactcgtcgagcgaatggagatgaaaaagtaataactgcaaatgaagggctgtctgaaagtacagatgcagagactgcatcagggtctacaaggaagagagggtggaaaccaaaatctctgatgaatcctgaggaaggctattcatttaagacgtcttcaagcaagaaggtgcaggaaaaagaacttggggattcatcacttggaaag

SEQ ID NO: 195174 - DNA, 1437 bp, Arabidopsis thaliana landsberg
atgacgattctcgccgggttgatacgccggcgttttagtagattagttccggttcaactgaattacggtttcgaaccgtcgcgaattctctttaacccgagtcaaggaagaactcggttgctgagcggcgaggctgagtccaatcggaacgagtttccggtggagaacgcttacgatatcttgaatgtctccgaaaccagctcaatcgcagagatcaaagcatcatttcgcagactcgccaaggagactcatcctgatctgatcgaatccaagaaagatccatcaaattcgagacgattcgttcagattctcgctgcttatgaggtacaatgaagaaagcttcactcttcactcttatgattagtttcaaaatcgaaaatttcaagcttttcaagcttttgtgatagagttatagctttagaagtgtctgatgaatgatttgtggtgatgatacagattctatcagattctgaaaagagagcacactatgatagatatttgctatctcggagaatggtaatgaagaagcactcgggacaaggttatatgattcacaggtataaaacaggattgacattgagtcaagagatggaagtagttgaatggttaaagtggtatagagaagcaatacatgatatagtattggagaagagagtagcaaatggtactggttacttagatgaacttgaagaagatttttattcagctatacgagcggcctactttgggcctgatgttgaatctgttgagcttcttcctgattgatttgaagctgaggaaaggtctgtgtatgatacacgagagggtttgcatttggtatcaggacgggatctttttggtatggattccttggttgataacttccttgagctttcttctgcttgctcaaagaaattggctttgtcgtcgttgatggattcggaccttggtcaagcagttgagaaaggcaacaatgacatgatgtctgctaaaaggattggtcttcaaatatctcatatacaatcttcaagaagtaaaaaccatgtttctgatgcgtataaagatattcagctgcatgtatctggaagagttgttgctacagccattagggttcccccaaaagggtatcatgaaaagaaacaaattgagggtgatcacgatcttatacacgttttcctcaattcagatgaaggatctaatcatggcactgaatcgcctccgggaaatgaaagtggtgccagacttcttgttggaactataagtggtcttgggacaatcccagatgaaggttcatgttatgtctatgatgggaatggtgctaagactcatgtgataatgaaacataggacatttctggtttgtgacttatatgatctagcatttctttttatgtacctttcgcaaattacaacgtgtactttttcggggaattgttctgtgatgcatatagagatatga

SEQ ID NO: 195175 - DNA, 617 bp, Arabidopsis thaliana landsberg
ggagtaaaaacagagcagtggttggtttggcagccaatgtagttattaggttgattcgtattgttcctccttctatcttgcattcatattctttggatctcgtggagtctttatcacctctgttatgttgtcaacaattcgatgtttcgcttccctgtgccgttgctttgaacgctattcttgtgaacgtgagagaaactaaggaaaaagaagtgtggaagattttagaggatgagaaaactgtggtttctgttgttggtaatttgcagatcttttctgaggggagtatgtcagtggaatggtttcaagagatggctttgcttctgagtacaattatgttgaagtggcctcagtctaggtattctgtttggaacaaccctgccttgatgggtgtattggagagtgttagtcagaagcctgatatgggtttgacagttgcaactttgaagctctattcttctctaggtacatatatgcttatcaaacttagatattatgttctctactgagctgccaactaaattggccttaacttgtcccttgggtgtttctctgtttttctgttcagctctttgtggccatggtgccgatgagcttttagacaatgggaagcctat

SEQ ID NO: 195176 - DNA, 80 bp, Arabidopsis thaliana landsberg
agcgaaagatttctcccggagtacgccgattaccccccgaaccgtacaagatagttaccacctatcatacggctttctaa

SEQ ID NO: 195177 - DNA, 480 bp, Arabidopsis thaliana landsberg
atggctggagccgcttcttctgatcgtctcgtcactagcttccctcttctgggtacgttgcttttagctcaaagattaaaacttttttggcatcggaagttatcattttgtgctcgtcttataacttgcgattgatttctacccttgggtttagggtttagtgactagtgttatcagtatctgtcgtaggttttctgtttctgataggattgattggtgtctagagttctctacaaacctctttatgggatgctagatgaaattttgtgtttttctgcaagttagtgtttttttatctgcttatgggttgaatttcaccagtaatttgccttgtttagactgtgcaattggagtttgaggctttgtcattttaaaatattaactgggctcttgtatataatcgctgcagatacaacagatttgtttcaggacttgtctttaggttcagatgcaaatgaagttcctatgaactttactaag

SEQ ID NO: 195178 - DNA, 418 bp, Arabidopsis thaliana landsberg
atggacactagagacagactgaaagggttcgacaagtttctccacgagacttctcagaaccaaaacacaacaacggatttggacaagtacttgtctgaaccgatctttccccgtagtggcgagttcaacattctgaattactggaaggtccatacaccaagataccctatcctctctttgttggcccgtgacattttgggtacgccgatgtcaatctgtgcgcctgattcaaccttcaactctgggacaccggtgatctctgatagtcagagttccttgaaccctgatatcagacaggctttgttctgtgcacatgactggttgtctacagaaacagagggtacaatctcaaactctatttaagtcttcttctcctttataagaattcaaaagccaatcaatcatcaactcctactga

SEQ ID NO: 195179 - DNA, 258 bp, Arabidopsis thaliana landsberg
aagatcggtgcggaattcgctcgattcttcacgctcatgttcggcggcggaaatgcggcattgcttctcgtgaagccgaaggtgcgcaagaagagcgatgatgaggaaggcgaggaagtatctgaagaggcagaggagccggaggaggggatcgatatcgacgtgaagctgcccaacaagcgcgtacgcggactccacatgcaggcaggcttagaacgcgcgcggagggggagggctctcatcttcgggatgagccag

SEQ ID NO: 195180 - DNA, 260 bp, Arabidopsis thaliana landsberg
ccgtggggcatcaccgggtgggggatgagcttgacgagcaccgcggggtaccgcaggtcgatgtctgggtggtgatttgcggcatccgccagcgcaccgtccctgtcgacgaactacagtcccttcgcgaacgagccggtcgcgaagtaggcggacgcgccgctcgagagcacgcgccagtcttagacgcccggcgattcatggaactgcttcgaggtgatgggctcgaccatgcccggaggctacagcggctgctctga

SEQ ID NO: 195181 - DNA, 131 bp, Arabidopsis thaliana landsberg
gccggtattggttaaatttatcaaggatcatgaatttttccaaggacagtttcgttgtgataaaagatgggctgaggaaccttcttgcacggaaaggattttggcatcttggaatagtgatatctctcgag

SEQ ID NO: 195182 - DNA, 129 bp, Arabidopsis thaliana landsberg
gatgaccataagcttcgatttgggcctaaaccaaagtcaaaagcccaattaagtttttttgttcgaagggttagtttcttggtcgtctatagcccagctaaaaccatgctgcctacgtcacacccttag

SEQ ID NO: 195183 - DNA, 182 bp, Arabidopsis thaliana landsberg
taaagcagatgggcgaggggcgcgacgcgtgtgcgactgcaatggcgatgatggcacacggcggcagtcaggaaacacgagcggcgaccgacttttgtctggcgacgtgcgcgtttctgcgagtctggatgcagagaggcaatcggcgatggttggaagcagcgcgactcgactcgaccgtg

SEQ ID NO: 195184 - DNA, 20 bp, Arabidopsis thaliana landsberg
tgagccgaagaaacgagtag

SEQ ID NO: 195185 - DNA, 228 bp, Arabidopsis thaliana landsberg
atgacgcgaattatcctgcttggggaatactcgccctcgctggagtcgcatcaggtgacggatgctgcgctggctcattccagcgcagcgatggggatcgtgatcgagactcaatggatctcgacggcagccattagcgacgcgcagatttcgagcgccgacgccgcgtgcgttgcaccgggtagtccctacaagagcatggatgccacactccgagccatccgactg

SEQ ID NO: 195186 - DNA, 419 bp, Arabidopsis thaliana landsberg
ctacaagtttaaaggggtcttgatttggaacccctggttgaaacaaactagattattcgcatccaatcatcattatccaacgaaatatgtcataggttatgataataagaaacgatacaaggtgcttgattatgaatttgaaccatcatcaaaattgacgatttatgagattgggttatattcaaagaaagttaaagatttggagtctgatagttcttggtcagttgtccaatccaatagtgtatctctgaatggaactttatattgggctggtgtagatgttaacaatggtattttcattagaagcttcagtttttcaacagagagactaacaactttttgtcgcctacctttgaagtacaatgaagacaatattctagcccttgcggtttttaggaaagatcggttttcgttgttaa

SEQ ID NO: 195187 - DNA, 519 bp, Arabidopsis thaliana landsberg
tcttcagctcggaagaaactaggtgactcggtctattcttcttcttcctcttcctccgatggtaaagcgctcgcctacgggttacgagagaacccgaggaagagtttccgggtctttaatccggatcctgagtcatccaccgtttacaacagtgagacagagaccgaacctgaatccggagacccggttaagaaacgggtcagaggagatgtttcaaagaagaagaagaagaaggcaaagagtaagagagtgtttgagaactcgaagaagcaaaagacagttcacgagtcaccagaaccagcgagttctgtctctgatggttctcctgaacaagatttagctatgtgcttgatgatgctgtcaagagattcaagggagctcgagattaaactgaaaaaaccggaggaagagaggaagccggaaaaaagacatttccctgagctccgtcgctgtatgatagatctgaatcttcctccgccgcaagaagctgaagctgtcaccgtcgtttcagccatataa

SEQ ID NO: 195188 - DNA, 415 bp, Arabidopsis thaliana landsberg
atgaggaagatggagagctggtatagtcggttccagctgatgggggtgcaaccggatatcactacatttaacatactgatcctgtcatttggaaaagctggtatgtataagaagatgtgctctgttatggattttatggagaaaaggttcttctccctgacgactgtcacttacaatatagtgattgagacgtttggaaaagctggaagaattgagaaaatggatgatgtattcaggaaaatgaagtatcaaggagtgaaaccaaactcaatcacttattgttcgcttgttaacgcgtatagcaaagcaggtcttgtcgttaagatagattcggttttgaggcaaattgtgaattcagatgtggtactggatacaccgttcttcaattgcataatcaatgcatatggtcaggctg

SEQ ID NO: 195189 - DNA, 1743 bp, Arabidopsis thaliana landsberg
atgtccacgatccattgcgcttctgaatctgctcaaaaggtaagtggtttgcgatcacctgatgagcattatgagataaaccagccaagtacattgttcattactatatattatgtaacataacataagatctatataagaattgtgtttatggttgattgcaagatgaactcgaatgtacgatatgacattgcgatgaacagcttcattatagtcctcaacattgcagcgatcttgtatatgaaattttaacaagatctccttaaacgaagttgctgaagcttgggaagttggattatcggaatcacggatgtgcgagatcgtgaaatagcttacgtctttgaacgcatttgtcataactttggcttcgttattttcctctacctcctttcttgtatctctacccgcttggctctattcgttggtctacactttggtctaccttattggctacggtacgtagctgccatgattggatcgtctctactagaagcaatggaggcagtacgagattgatggaaatttgtgaatcaacctcaatcaattgctgttaaataattttcattgaatttgaaagaattcgatcaattttaacgcctaagtcggagatataagttttaagttttttaggcttttctttttttcctttttccttaataattgatttattttaatcaataaataaacaaatattaataaagttttgctttttatcaaaaaaaaagttgcatgttcaaaggtgttaaacaacggttatcagattaactacactattaattttactaatatagcgcgcataaaagtatgagattgataaagtgtcgctagcgacaaatgaagctttaacccggtccctttcggatggagagattaaaaaagcacttttcgcgataaatcctgaaaaaaccccggtctgacgggatgtcaagttttttttatcaaaaattttggaatatcctagggaacgatctcatcaaaacagttaaagacttctttgaaacaggaacttttgatcccaggttgaaccaaaccaacatttgcctcatcccaaaaagtgagagaccaagagatatgaaggagttcagaccaataagtctttgtaatgtaagttataaagtcatctctaaagtgctttgtaaccgcttcaagaaggtactcccgcatctgatctcggagacccaatcggcctttgttgctagacgtcttatcacagataatatcctcctagctcaagaaaacttccacgcccttcgtactaacaaaagctgcaaatccaaatttgtggctatcaagacaaacatgagtaaagcctacgaccgagtagagtggagctttctcaaatctttaatggcaaaattgggatttgatgataggtggatttcatggattatgtattgtatatcctcggtctcttatcaggtcttgattaatggggaagcaaaaggtcaaatcctgccaacaagaggaatccgccaaggagatccgctcttccccttcctcttcattatctgcacggaagcgttgatagctcaaatcaacggagcggaaatcgagggacgattcaccggcatgaaaattgcacaaggtagccctacgatttctcaccttctttatgcagatgatagccttttcttttgtaaagccgatatcccgcaatgtgcggagcttcttaggataattaacacatacggacttgcttctggtcagcaattaaaccgagaaaaatctgctgtttttttttga

SEQ ID NO: 195190 - DNA, 1061 bp, Arabidopsis thaliana landsberg
ttcagaggatcataagatcaagaaaagacactctggatcaaaatctgtgaaagagaaaccccactcagattatgagaaagttgacgatggagatgcaaattcaggtatcttaaaagtttattaatggagaagcattatatcgatattaatcatccttataataggagctttcttttatgaactcgacagattctagtcagcaggaaaggaatcttgaaggtcatttattgtcattggattcgatgtcatcacaggttagtggattgaatagattattgccttgtaattcctcagtaaatgttttttccctggaaccaaaaaactttgttttgacggttctgtgattcttattttaggatgtggagaagtcaaaagagaatccaccatctagcagctccagggaaagagggtgatacaaatgatgatgagaagtttaaggtgcggtttttatttctaggagaagaagtgtgtgtgtgaacatataaattatctcaacaaaattttcatctgtttacatataatcttccagttgttccaactcttgcttggcctgattaattagtcctaatgtggtaggaagcactgagctatcgctaaggcaaaactaaaacatcatatactgtccttttgattatagtttcccgtccctgaataattttgtaggtagtggttaagatttaacatgaaaaatttccagaagttattttggtgcttactttctttgcatgccactacttgtcttcttgttgctttatattgtgtagagattagttcatttctggttttaatagaaaaagattagagctctaccacttaactgcctagttacttatacaccctttttcacatgtttgaacttgaaaatcagattgaggagaaaaggattattcttaagtcataggaacatctggattctataggtaaaaggtaatttcaacgtgcttaccgatttaagtccttaccctgtcttcatatgagttcttcacttctactacctttcaggtttgatggtgcagcaaaacagtgaagaacttcattccaatgaatcctctcaaacttga

SEQ ID NO: 195191 - DNA, 455 bp, Arabidopsis thaliana landsberg
gtatagtgatcctattcatataggaaaggctaaccgtccctcgtttatgggaaaatcctattcttctctagggcctacgaagaacaataggatccggaatgctaacccgtgtatgggaaaatccttgatttccttctgtgtgtgcaaggcctgcaaagagtattcttaacataaggaacccacacctttatgttaatgacctaattgatcatgttaataagtttggaaattaaatagccttcaagctttaatttggttgatcattctgtatccctttgattttagggattcgcccaagccgtacctacttgagtgatgggtatagttggtctcatactaaatccggtaattatacttttaagtcagggtattgggccgcgagagatctgtctcgtcctacttgtgaccccccttttcagggaccaggtgtttcggcacttcaggcacaagtatga

SEQ ID NO: 195192 - DNA, 632 bp, Arabidopsis thaliana landsberg
ctcagcaaaaccggcgagatgctcaagacgttgtcgtatggcgaggggaaaatgatgtgtttctcacaactttttctacaaaggatacatggtacaatatcagaactacagctcctgaggtagcttggcacaaagcagtatggtttgcccatgaaactccaaaccactctttctgtgtttggcgagcaatctggaacagactctcaacagggcaacgtatgcaacattggaatctccaatcttcagtgggatgtgttctctgcaacaacaatttggaaacaccagaccatcttttctttaagtgcgcctacacttctggaatctgggaagcattagccaagaacttgttgcagcgtagttagacatcggattggcaaactattatcagctacgttttaggccaatgccatgacagggtctcttgttttttggctcgaagtgttctacaagcatcaatatatacaatttggagagaaagaaatggaagaaggcatggggaaaccccaaacccagcagctcgactaattcagtggattgataaacacattcggaacatgttatctgttattcaccaaaagggagataagagatacgacaagggacttcaaatgtggttcgcctatcgatcttaa

SEQ ID NO: 195193 - DNA, 64 bp, Arabidopsis thaliana landsberg
atggaagaaaagattctggttatcttgattggcgatggcaaccacacggctgcgatcttccacg

SEQ ID NO: 195194 - DNA, 84 bp, Arabidopsis thaliana landsberg
gttacaaaaatatgatttaacatgtattttactaaatgttctgaaatttggtttcgatggcctattacggcgaagagttgctag

SEQ ID NO: 195195 - DNA, 278 bp, Arabidopsis thaliana landsberg
tatgctttttggaagataccacacaccctcttatgggtaacccgagtgatggatctcaatcttggaaggttgtccatcggataatgagttttgaggatgtcccgttaatacaggacacgatgaacatggtatataaccactgttatttagctttatattgaggcattcatttcatttacctacactaataacttcataatattctacttgttttgcagaacgggaatgatgtctttcttggaatgacacacgcgggccttctcagatatatagagtag

SEQ ID NO: 195196 - DNA, 881 bp, Arabidopsis thaliana landsberg
  unsure (1)..(881): unsure at all n locations
aagtttttcatcgcaagcaaccatttttgtcagcgagactctgagcatggtgagaatcaacaagaagcgaagaagagagaagatgaagcagaagaggatgagaaagacgtggagctaacgttaggtctttcgcttaatggacagtttggtacggatccgagatcgagaaaaaggaggcactttgaactgggtcgatcttcttcgataccggaaggtttcgtcttcgatgaacaaagatccggcggcggtaacggtggagatatgcgtcgtattgtgggccgtggaggctcagacatgtttcagctggatcggacgcgttctctgccggtcgtaacggagatggatatagagaaagagcggaaggtgtcagagaagacgagggcatttatggaatctccggttacaaacagaggagcatatctagcaaaagataaaaacagaggcgaagctgtcgaaacagagaagctgaggcgatttctggaatttaagattccctccgacaaggacggaaagataganaagatcggttggttgtcactggtccggtcaacgggaagggtaaaaatggaaatacggcgaagaagcagaagaataatgtggaaaattcaggaatggagaaggcgaggaacattcttgaagacatgccttgtgtgtcgacgagagatgtcggagccgacgggaaacgagtggaagggtttctttactggtacggagggaacaaggaggaggtcaagatagtttgtgtttgccacggcagttttctttctccggcggaatttgttaggcacggcggaggtaccgtcagcgatgatgatggtggtgatgttatgattaaccctcttagacatattgttgttaaacttccttcttcttctatctag

SEQ ID NO: 195197 - DNA, 542 bp, Arabidopsis thaliana landsberg
atgggaaaaggcggtgcacttagcgatggagtcatcaagaagatcctcctctcctacacctacgtcgcgatctggatcttcctgagcttcaccgtcatcgtctacaacaaatacatcctcgacaagaagatgtacaattggccttttccgatcacactcaccatgatccacatggctttttgctcttccctcgccgtcatcctcatcaaagtcttcaaaatcgtcgagcctgtttcaatgtctcgagatacttacatcagatctgtagtcccgatcggtgctctgtactcgctttctctctggctctccaattccgcttacatttacctctccgtctccttcattcagatgctcaaagctctaatgcctgtcgctgtttactcaatcggagtccttcttaagaaagaatcgttcaaatcggagacgatgactaatatgctctcgatctctttcggtgttgcgattgctgcttatggtgaggctaagttcgatacttggggagttatgcttcagcttggtgctgtagctttcgaagcaacgag

SEQ ID NO: 195198 - DNA, 213 bp, Arabidopsis thaliana landsberg
atgagaacaaccttcaaaaggccaaagcataagcaatgtcggaaggcaaaacttcaggagcaacctcgactggcaatctctctactaagatatttgcttcaaaagtatccaaaacaccatccggtgcaagcactcgcacttcagtccttgccgggaatgctcatgaaacatgcaatatggccgatcagcaaattcttcgacatcatcagcaaa

SEQ ID NO: 195199 - DNA, 213 bp, Arabidopsis thaliana landsberg
atgtcgagctttggtatcacttctatggctataatggctgtttattaccgattttcttggcaaatgaaggtaaattataataaataaataaatatcgaaaattcgatactatttgtcctaatttccaaaagtgaaaattttgattttttttagggaggtcaagtgtatgtgttagagatgtttggtacatttgctctttccgttggagctacc

SEQ ID NO: 195200 - DNA, 309 bp, Arabidopsis thaliana landsberg
aaacatggggccgcaaataagcctgctaggggattaatatttgggcctactaaagatgcaaactcagtaccagttggggaggatttgttatccaacgggaagcgactgcgtgtggaacaaagagatgttgggagaccaggtggtgtgtattcaagtgcgatgggttcgcatgcccatgaggctagtttggacttggattcatcgtcgactttgtctcagcggttccagcgggaggatttgatgtctgaaatagctgttgtgagtcatgaaggatcggaagtggggaattccagtgagggaatggcatga

SEQ ID NO: 195201 - DNA, 870 bp, Arabidopsis thaliana landsberg
gaggattatcaagggctataaagaaagagcctttcatagtcttttgcaatcttcttcttcgtcttcttcttgaactttattcgaaaatgccgaagaataaaaaaacagaatggcaagtaggagatcccgcgataagcgtagtgagcgatcaattctgtaatccatacccaatggatcttttggtgaagagaaaagttcagaatttttctaaagattattatgaagtgtttgatccaagtgggaatctgctcctacaaattgatggacaagcttgggggtttaaccgtaaaagagttatgcgtgatccagccggtttcacaatcctctcaatgcgtcaaaaggttacaaaacattttaatttttcaacaaacatacatataaaaatgactctttcttgaaacggtgtatgattgtttagggacttgcgttgaagaacaagtgggaagtgcatggaggagagagcaaagagagagaagacttgctcttcacggtacaacaatctcaagcggtttcactgaaaacatccgtggatgttttcttgccggagaacaacaatgtcaagaagacaaacacttgtgattttcatgcttcaggaggatactctaatatctcattcaaagttttcaaagcggatgctctcatcgccggggtaggggtaaaagttaaaaacccatacttattaagaaatttgcaatttttatacattggtgaaggattgaaatccttatattgcaggtaacacataagtttacatggggaagtttctgcaaagggaaatataactttaaggtgagagtaaatccagaggttgattatgcttttatcattgctttgcttgtcatggtcgatgacaacgagaattggtgttag

SEQ ID NO: 195202 - DNA, 363 bp, Arabidopsis thaliana landsberg
atggagtttttcgaacaacgaacccacaacgtttggtaagtgaaaagattgataaacgagaaaacagttttctaacagaaatggttaaaactttcaaatgcttgtgaagaccatgcaaacttgtttttgttagatacttatcgtagaatatggatagtaagtttaaatccttaattgtcttctaataagcaaatgttataatatcaaatgactttttttctcttctttatagaaatcatttatctaactctttctgttgggactttacagatgttaaaaacagataaacctatgagaattttccatttatatacacgtatttatatctatccctacagggtacaggctacacatgcatattaa

SEQ ID NO: 195203 - DNA, 290 bp, Arabidopsis thaliana landsberg
aagaagatcttcaaggctaaagagtttcccaaggatgaatcaatggagttttctgcactcgcttctttgttggagaagaatcttcaactggctgcggaaccattcaagagtaagaagtcaggagttgacccttccaagaagaagcagtcagctgcgtggaaccgatacaagatgatcacccaccttggccagaactcaacttattgggttatgaagataattgactcgagaaaattctcagaagctgaattggagaagatcttggatgtgtttcggagtgctgttaccgg

SEQ ID NO: 195204 - DNA, 238 bp, Arabidopsis thaliana landsberg
atgaataagttgttgtttggaggtatttcctctatgacaactactattgcagacaaggcttttgacaatcataatcaatggttcttagcgcagccttatagacatgaagatgagaaaattatgaggattatgcactggagtccacctttgcctggtgatttgaaatgtaatattgggtttgaatggtctaaacaacatcaattcttgggcgcatcttgggcggtacgtgattcacaag

SEQ ID NO: 195205 - DNA, 138 bp, Arabidopsis thaliana landsberg
tgaaaagacatgaattctccttgaaaccaacgatgaagacggtgaacctcttggttaaatatcgccaaatatattacttcgagaagcagagattctatgactcttcttcttctttgccttcatactccttgcaaattg

SEQ ID NO: 195206 - DNA, 117 bp, Arabidopsis thaliana landsberg
cttatgatcctcacgtggtttggttttgttatatttaatctctttcgtcgactctattttcaaagtattcgattagaaaaattcattctagaaaaaaaactagtcggtaatacttaa

SEQ ID NO: 195207 - DNA, 1127 bp, Arabidopsis thaliana landsberg
acaaatccggcttggtcgacatcgtagattatgacctggttagagcggagagcgggagggtttccttgttcgtcaagcttgaacaccatttagcttatattttcattttcgcaacaccgttgatgatctgggcggtcttgtacaacgagaccaaatccgcctcgaagagtacatcatctgttattcttttattttccatgtaattcgacttcgtttctaaaagaaaaatcttctcacttttttgagaatttctttctcatactagttgaagttcgccctcaacagttggcgtgccaggtagagagatagcttgaggatttcttccaactagccagacgagcccgcttacagatcaaaataactacgaagggaaccagtgcttgaggagacaatgactctagctcaagagaaggaaccgatacgccacagaccgacataatcctcctcacaagaaggatacactaattagtatcgtagttgcgccgcctttgctacctccaactcccaaaggtaccgcgtttgggataatcatcaagacttccccgccaatgcaggagaacaacgaacaaacatcgccgagcagacgtcgtccgaccaaccttgaaccacacagcagcgtgcaaggtaacccggccgtgtaccgttcgccaacgcattttagagcatccacgaccattttaagcaggcaagatgcaatgagcgacgataagttcgcatccctgacagtcgcgcacgctttttctccagaccaaccgcacaacgaacattcaacaaaccaacctcgctaacgtcttaggcgatacaagggacgcagagatagccgagttgaggtgtgcagtcttggagatgtgctcgaagatccaccgtgctacaagcacggttcccaaactcgaccacgtcctcaaagagacgctacaaactcctttacccgaaggataacatacgtatcggttcgagggtatcaaaagatcaaattggaaagctacaacgataaaggagacccgaaagaatttctgacgtcgttcaatgtcgacataaatcgagtcgaacttaacatcgaaaacttcaaagcagggcaatgccaaatattcatcgaacatctctccggagcggcctcagctaattga

SEQ ID NO: 195208 - DNA, 115 bp, Arabidopsis thaliana landsberg
cggatatccgcaaatatcacaaaaagttccggatattcgaaattccggatatccggaaattttcgaagcaaagcaaatcacaaaatcaagtattcgtttaaaacgaatcgaataa

SEQ ID NO: 195209 - DNA, 198 bp, Arabidopsis thaliana landsberg
catctctacagtttctctctcctctaccgccggaaaaaaaaaaacgatttctccggccggttttcgtttctccgttccgttaatagccttcgttttctcgtccttggaatcgtcctctggttgatttctgaatgttcgtttgactcggctacgcggcgattcggatctccgtgtttgactcggtccctggctcgttaa

SEQ ID NO: 195210 - DNA, 125 bp, Arabidopsis thaliana landsberg
atggtaacaattacacagttgattccatttcgtgaaaaactcatagaaacaacggtgacaaatgaagtttccatagccaagaattggatcctcgccatacgattacctaccgagatgaaccaacg

SEQ ID NO: 195211 - DNA, 92 bp, Arabidopsis thaliana landsberg
tgctaaaacccaacaagtacaaaaccgaaaaaacccacaaaaactcgcaattaacccgtgacccgattgaaccggccgagtgtgggttttaa

SEQ ID NO: 195212 - DNA, 162 bp, Arabidopsis thaliana landsberg
atgaacgaagttgtaatatcaagtaggagacacatatctagagaaaacaatacagacgatctcgaattgccattgatggagtttgaagaagttgccatggccacaaacaatttttctaacgccaacaagctaggacaaggtggttttggtatagtttataag

SEQ ID NO: 195213 - DNA, 165 bp, Arabidopsis thaliana landsberg
gattgggtaaaactgaacggaaaatatgtattagaggaaggacaagtcagcaacttccctcgcgggttgtgccgatcagccattgtcttttcagcacaaggacttgagtgtttatcatcatcaacccgactaaaaaggaaagacaagtcttccccaatccgttga

SEQ ID NO: 195214 - DNA, 36 bp, Arabidopsis thaliana landsberg
atggattcaacatcggaaaagatgtacctctgccag

SEQ ID NO: 195215 - DNA, 165 bp, Arabidopsis thaliana landsberg
aacattcatgcatatgacgaacaaatagggactaagagagcagccctgtctgaatcctctctcactaccaaaatagcctgcgagttcaccgttcacttgtaccgagaaagacgctgtagagatgcatacctttatccaattaatgtagacttccggaaaatctag

SEQ ID NO: 195216 - DNA, 471 bp, Arabidopsis thaliana landsberg
ctgaaaaagagagaaggggtcaagggttattgaggccacgaacaacgcagaagtcagaaaaggaaacttttttaccgaacctgaaagcgacttggcttgagaaacaagaacgattcttcgacttcggaggagtatctcgtgactcagaaccttcctgtcgaggagtcacacctcggtcagtcttctcgccactaagtcgaggagggggagatgtgaccacaggatggggaggacccatcgatcgaggtggaagagataacctaggggaacggtccgtccgagcctttgatttctctctcagtggggaagagctacctcgggctgatatgtctctcttcttgcgaattaagtcagcaactggttcgctactcagtccatttcagggagagtaacgaggagagttgcgatggggagatcggtttctccgaggcaaacggccaccacgacgttcaggacatggagttgatctaa

SEQ ID NO: 195217 - DNA, 135 bp, Arabidopsis thaliana landsberg
gtggctcctgcaggggatggccccccatgtgtgtctgacctcgctagtgacctggctaccatatttcggtatcctcgcggcccctctattaaggcgctcggtgttgacattttgtcagggtttgccgctggtctg

SEQ ID NO: 195218 - DNA, 285 bp, Arabidopsis thaliana landsberg
tataacaaaactggaacaaaatcatcgcagctaaatcaattacccatatcagatcgcgatgtttggggacgagaaggagctgaggccggagaagccagatcagcagacatacggcgagttacgggtctaacgtccgtggtaataggccgagaagcgatttcgggagcagtcgccgaagtattaacatctttgggtttctccttgagcgtagtttgttctactaatctctttagtgaagaagtgagactcggattcgcgaattttacagaagaagatgactgttga

SEQ ID NO: 195219 - DNA, 541 bp, Arabidopsis thaliana landsberg
tcaatcttatcaagtcatcgtctacgcttttttccaccatcgccttcactttgaagaagcgtgagtgtaggtagtgctatatacttgtgggaaatttgggaatatgctcatttacatttttacatgtatagacataaatctttaggttggatatgtgacatattatttatgattcttttttcaatttatataaactagtagaccacgattcagttttctcactgattagcagatgatggatttggtccgtatttaaaataaaagacatatatatatatatatatatatatatatatatatatatgttccgttttcctgaaatcaactgcaaaaagttttcaacaaacgattaagaaaaatgaaagtgacacattaacacgttagataatgcattaacaaaatattctttcttttcttttttcttcattctttttaccttcgtttataggagggaagaaaatgaaccagaattttgttgatattgaaaaaccaatccgaataaagaatctacgaaatgacactatactaaactcgttctatg

SEQ ID NO: 195220 - DNA, 1066 bp, Arabidopsis thaliana landsberg
tttcttcgattttcgggatgcaggtcatcgtttacacgtgagtcaaactctaaaatgttcactgcgcgactttcattcgtaaaacctatctgaatccttttcctcttgtgcagccttgtgatcttgggatggattctggtgactggtacattcatcttgagtggaacattccttgtgctacacaagtatgtctcatgactcttgaacaacttgttctttgttagttaaagctaaaacataactgaatttgtttctttcaccgtcagtgcaactgcagacacatgtgtggcaatgagcgaatgggttgagagaccatcaagcaatacggctctggacgagatattgccttgtacagacaatgccacagctcaggaaaccttgatgcgtagcagagaagtgacgggtcagcttgtggagctaatcaacacagtcatcactaatgtctccaacatcaacttctctccagtctttgtcccaatgtattataaccaatctggaccgttgcttccattgctctgcaatccttttaaccatgaccttaccgatcgctcttgctcgcctggtgagctcgatttgaacaatgctactgaagtaagtccccctctgaccaatttctttactgttgaaactgtctctagtaggcataaaattgcacttgtacaaagaaatcttagtgatgtcaaaacactctcaggcatggaccagtttcgtgtgccaagtgagccagaacgggacttgcaccacaacaggaaggcttacacctgcgctgtacagtcagatggcatcaggtgttaatatcagcacgggattgatcagagacgcgccattcctggtccagcttcaggactgttcatacgcaaaacagacctttagagacataacgaatgaccattgtcctggactacagcgttatggctattgggtctatgtgggtctggccattttagcaacggctgtgatgctctcacttatgttctggatcatttacagtagagagcgaaggcatcggaaggaagctctgcctgaattttctgaaagtaaggagattgtaagagttaacttttga

SEQ ID NO: 195221 - DNA, 21 bp, Arabidopsis thaliana landsberg
gtggcgaaaatcggcgattaa

SEQ ID NO: 195222 - DNA, 136 bp, Arabidopsis thaliana landsberg
gtcctggccgatcctggattgcgagcacgcgttccctattacgcggaacgtctgccgaatggaaaattgggttctccccggaaacaccgaaagaacgctgaacgcggacgtccattacgcgaaggccgcgggctag

SEQ ID NO: 195223 - DNA, 410 bp, Arabidopsis thaliana landsberg
acccacctttgtttccacaatctcctcctccaccaccaccgcctcctcctccaccgccgcctcctcctccaccaccaccacctcctccgccagctgtcaatatgagcgtcgaaacaggcattcctccaccgcctcctccagtcacggatatgattaagcctctgtcttctccgccgccgcctcaaccaccaccgaggtcacaaccacctccgaagcctccccaaaagaacctgccacggcggcatcctcctcctcctcggtctccggagaaaccgaaaagagatggtttaaacaaagggaagacggtgggactagtctttgttgggttaatagcaatgttgcaggttattgttgttgtattcttggttttcaagagaaagcagcttctcagcttgaaagacactaattaa

SEQ ID NO: 195224 - DNA, 46 bp, Arabidopsis thaliana landsberg
atgattggaacctttgccgttatagttggcgcccaaaaacaagaag

SEQ ID NO: 195225 - DNA, 409 bp, Arabidopsis thaliana landsberg
atggcttagcaaaccgggctttaaggagtcggttcatggaggttgtgaggtccctcctcaaggaggagttattttttctcaaaaagtgaaaaattgtaaaaggtctatttctatttggaaaaagtcaagctcttcaaactcagagaaaaaaattctaaaattacaaaatcaaattgataacgcccaagaagacgagtccatctttgctaaggaattattagctctaaagaggaagttttgcgatgcttatagagaggaggaaatattttggtgtttgaaaagccgtgaactttggtttaaggaaggggataaaaatacaaagtattttcatgctattgcaaagcaaagacgagcaaagaataagattattgggctcctgaaccaagatggtctgtgggtcgacaaggag

SEQ ID NO: 195226 - DNA, 992 bp, Arabidopsis thaliana landsberg
atgaacattcacataaactgtctcgctggtcccagtaagttctacttacaaggagctacaacaaattggtcataaccggaaagcgttcaaggatacttttaagaggtaatatctcaactaactctctaacaagactacaaaagagagctgtagaactaactatctagcaagactacatatctatagaagagaaagacaggtgaagacattaaagcatgaccatttagcaaggagacacagaggtttaagaatgaaacagctctttgttcaaatagtctagggtggtgcattagaagattgatgcaatagacaataagtatcacaacagaggcaattcaaacaacctaaacttgagagttaccaaaggatgaatgcgtatgtactcaacataatcacagaaactccagtgaaccagactgtataaagttataaacatagtaacggtatcacatatgacataacatcatggaaaaaactttggatgcagataaagctaacgcgaatcaagtaaacctgtagtaaaccatgattatatggagaaattcattttagctaactcttttttctcaaatacccgataactgtgatagaagtaacagagctacagagaagaactgggaaatccaggtataccatattcgcccatgtatgcaatatgctctaaacagaaaacttgcatactaaaacttgaatgattgaaacactacgaaaaatgaagtcttttaactcttaatccatccaaaaccacattgtcaaaatacattgattactcatctactggcgaaacatcacgacctatagaatgctaaagacatattgattccaacacatttataagttttttttttgtagaaactaacaaagatgaaacctcattctcattcgaatttaggctctgccaccacgaaatggtatgcaatgaccattatgaagatgaaaatccccagaaaattggcaaagaagccgaggtcttggtcgtcaaacatctgtaa

SEQ ID NO: 195227 - DNA, 339 bp, Arabidopsis thaliana landsberg
atgtattaccttctacgttttgagcttatgaaactagttgaagaggtctatggtgcgtatcgtgcattagctgagaggtataatcatgcaacgggcgtaatccacaaggctgatgagactatagcacaagcgctaacataccaagttcctttgatatttggtgatgagccacctggtggtgctttgacaaatgacgttgatccacaaacaccgaacatgcctccttctttccaaactaggagtgacccatatgagtcgcaacaagatgctgactggttctctttatctcatgttcatgatgcagagaggaatatacatcttactgaacaacctctggtc

SEQ ID NO: 195228 - DNA, 36 bp, Arabidopsis thaliana landsberg
atgggcttcatgcaaaaaggccgcaaaaaggtctgg

SEQ ID NO: 195229 - DNA, 268 bp, Arabidopsis thaliana landsberg
atggcaatttatgtggaaaacaaaaacaacagaaatgggcatcgaagtctgcgtgaaggccgcatcaggtgcacctgatgttctcggtgactgccctttcggtcaaaggatacttctcactctcgaggagaagaaacttccttacaaaactcatctcatcgacgtttctctcaaaccggattggttcttggctattagtcccaagggaaaacttccattggtgaagttcgatgaaaacgaaaattgggtggctgattccgaccttata

SEQ ID NO: 195230 - DNA, 220 bp, Arabidopsis thaliana landsberg
atgcactgcttcccgcccactgatgccggcttcctcagctgcgatatgcaccccaggatgctcataccttccactcccccatcggccatcatcacaacctacggcggctcggccatatccgtaattaaggacgcgcgggtcccacagttggatgacaaatcttattttctcatgaggaaaataagcgcctcagctgtgagctgcgggcggcagatatcag

SEQ ID NO: 195231 - DNA, 101 bp, Arabidopsis thaliana landsberg
atacaccaagagcccgtcatgcatgtcgtatatccgaaaaacaaagcatgtcccgatgggtgtcaatagacatgcaacgtagcatttacgattggttgtaa

SEQ ID NO: 195232 - DNA, 126 bp, Arabidopsis thaliana landsberg
ggtcccctaacaatgcatccttcacacctgaaaaacgtttccagtaaaaaagaagaaacagaaatccgagtctggttcagaattattattcacaaaaccgagaaaaccattgcccaggcgtgttga

SEQ ID NO: 195233 - DNA, 197 bp, Arabidopsis thaliana landsberg
atggcttcaccagaggaagttgatcaaacggagaaaggaggcgatgatgatttggaatcggagaagtgtgcaactcgaaatgagtactacaagctgctgaagggcaatgagtttttaggaactcggtaccgtcatcccgagaccatggagagactccgcatctatgatgatgtagactacatcactacaagaatatg

SEQ ID NO: 195234 - DNA, 437 bp, Arabidopsis thaliana landsberg
ctccgccaccgccgacaagaaagatgatcctgtctccggcaagaacaccgcacggcctccatctgttatcgatgaagagacagtagtcaaagaagtcttgtccgaaaccacattgctcacttcctctaacgacaattcgacggtggagaagactacgttgacaaagattcaagaagaagaggagaagaaacccgggattgttgtcgacgttgctcaagaaccggttttgaccaagcccagtttggttgaaccggaaaaaggatcggaggtttcggagaattgtagtttaagcgagagtttgctttcgatcgtgaataagtacgacgaggaagaagtgaagcagatgaaatctcatgtagtgagacagagatctccggcgaaatctcggaaccgggtcatggttagttatccaaaccggagaaccgatatgtctccac

SEQ ID NO: 195235 - DNA, 423 bp, Arabidopsis thaliana landsberg
  unsure (1)..(423): unsure at all n locations
ccaagtatgggctgaaaaatctagacgttcataccaagtttgaagtagacagcgaagctctcatctacaatatctctgttcatggtcctgaaattctcaaaaaggtgannnnnnnnnnnnnnnnnnnnnnnnnnnnnnnnnnnnnnnnnaagatgttcttcatccataccaaggaacgacccctgcattgggctcggtctaaagataagggcagtttctattgggccagtgaaccttggatgattaaagtggcttgtgctaaagcctctgtatctattgatgcggttcaggagtttgaagttgaccatctatattcccttgatgtaagtgaatgcactcagaagtttaggagtgttgaactagtcaagggggaaaagattgagggtttaaccccaaaaatcattcagcggactacgcagagtg

SEQ ID NO: 195236 - DNA, 187 bp, Arabidopsis thaliana landsberg
ataaatcaccccggccacgcgctcaacacgaacgacgacacgcccacctattggaacatggcagccaccatcaatccgcccagcgcgccaatagtgattcggagggggcagcgaaacactaacgcagatgagggtagcggccagattgatggaggaacgccgtgggaccacaagtttatacccggag

SEQ ID NO: 195237 - DNA, 577 bp, Arabidopsis thaliana landsberg
atgaccgatgattggaagagaaggagggctcggaggaaggtcacagcctcgtgagccctttggcttcttgaagaagaatacaaagatgcaaatgactgtgaatatggataagaggatctgaggatgaaaatgagttttttgaaagtcaacgacgattgttgccattgtttctcaaaaacaaagggggcagatacagaactactgaataatccatgaatatgttatatagtataagaccaagcatgctttgttcattacattaaaaaatgttatctgactgaacgaacgtgaaagcgttgtgagagagtcgaggaacaaattaataatatcaataactaaataattagcgttcaccgcccaaggtgacagctaatgtgatgtgaggaatcgagagatttaagattgactcacaatgtacacaatgttcttctttgctcttctttctttttttttttttttttttttttttttgaataccaggaggttctgggctgaaacccataatcgttctagacccgaaaccacaacatgtagtattagtttcatcccaagcatcactcgaactggcgacttctaa

SEQ ID NO: 195238 - DNA, 79 bp, Arabidopsis thaliana landsberg
gcccacgaggggatgaccttacgaactatggggcccttgggcctttcgtgaggtctcttatccttctagtggacccgag

SEQ ID NO: 195239 - DNA, 6 bp, Arabidopsis thaliana landsberg
atgcgg

SEQ ID NO: 195240 - DNA, 160 bp, Arabidopsis thaliana landsberg
atgcatttgcagaaagaaaaaacatatcaaccacacttcttagttaactttactaaaccatttgattttgccaaaggatatgcttcaaagtatcaaccaatgatggcagaaatttctatcataagaaaagaaattcagaagcttaacgagctggtccgag

SEQ ID NO: 195241 - DNA, 136 bp, Arabidopsis thaliana landsberg
atgcagatcaatagcataaaattgtcaaaagattacaccaccgacgatatgaaagtggatcaaatcaccactgcatgtggggatactccaggcgtccttgccttggattttgccattttggaaaatatcaaccgag

SEQ ID NO: 195242 - DNA, 1933 bp, Arabidopsis thaliana landsberg
  unsure (1)..(1933): unsure at all n locations
gtcaaggaattcatctttcaagaaatcatcagctattgttataactttcttgagtatgacgcaaccgttttcgtcactcgacaagaccaacaagtgacggtacgtgatatggcaaaacagtttcttgtgatgtacgttgcaaatgtttagtacttgtgacgccaaatcatagccgcgttcatgagtcataatctcctagaatctcatcatgatatatagggtagagaaggattgtgttgatatcgtctgatattccgaatatcttcatgaagcgacgtaagcctacttagtctctaatgattatgacgaagagatccaaatctaacgctagtatattcgcaaacttagggacttcatctgacctaccgaggatcaaaagaaaatcgtccatgtcagtttcttcggaactagtcattagtctctgcaagcgcctggtatgtggctgagttttgtcattgatgctctccataattttaaggaattaattagtcaattgtgtatggagatgaaccatgaatgttggattggtatttatagagtgaggggtttagtattcctaatttggatatataaagtggattgattntctcgttaagattttctaaatattttgttcataatttcttatataaaaacaatatccaagtgaaaaagaaaaataaaaagaaaataataaaagaagttctatatatttattttttatttttggtcatcaaactataaaaatactgaattaaataaaagtcgatacagaccaagtcagaaaataaataaaaaacagagccatgatcaaagacaaatgaaaactgctcagacgaaatcattaattggttagaattctcgtgtacttaacatttaaccattccccctgaaccggatcaggtttattaggctctcacacgtataccaaataaaactattttctcaaaaagttccttaatttatttaattatcatctctggtttcatccaagtgtaattattaaaattatacatataaacgttcaggggaaaaagaaaatattaatacactgagactataaatacacgtacagagacttgaacttgttttcttttcttgatcagttatcggaatcttttatttcttcttgatcagacgacgttgaatacagcgagacttggacttgtttcgatggagagagaggagccaattgcgaggaacgaggtggatcacgaaacgccaacgaaaccagatggtaaggttcttttctttttctatatttctgaggaatcatatataaccaaaagcacttcttctttgtgtttgttcatcgtgcagaatccgcctctgcatcatctccccgtaggtctgaggaaacgctaaatcagagtacccaaatcaaccaaacggtaaggtttccttctctgttggtattctcttaagtgatcatgaagaatcgtacaacgacttctttgtatttgttcatcatatgtagaatcttgaatcaccaattgttcaatcacaagaatcttccagcttcgaaaatgttttgtgtttgttccagagtcaaatataaccagccgcttgttttgtgtttgttcatctgcagggtccgagatcagtactacatcttcaatcacaagaatcgcatctcagcaattccacaaccacccatgcttcgtcgccttctgtcaatgtgacaccaaagccagacttgtcttcactttctaatacaacagcgacgcaagaaccgtcaccttctgctggacttcaaattaggacgattgagaaagaccggtcaccgggctctgccttcccaagacataaaagactaccagttttcgatgaggtttgctcgggtgcggtgtttccatggtatggaccgcaagaaccagacttgccttcttcatctggaataggaaccatgtcagcaaacagtcacgatgatgtaagtacaacgttccttgtatga

SEQ ID NO: 195243 - DNA, 170 bp, Arabidopsis thaliana landsberg
atggaacacaacatcacatcccggctcattgcatcggtgttcttcataaatgtaactgcaaccgggatgtggggaaatgaagcttgtattatcttcatcggtcgagtagcatcctttacacttggtgaactcgaagcgtgtaaaaggtatcaacggatgctcatgaaatg

SEQ ID NO: 195244 - DNA, 457 bp, Arabidopsis thaliana landsberg
atggaatgcttcaaagatcctcaaggctcatcagttcttcttctgactatggcagaagttggtggagataaggtgggttttcacttgtttgatgtggtggttaatggcaactctttcagatctgtttgactgatacgaagctcgtcttcaaagctgattagtgagccaccaccctctggatccttcgcgtttggtatccacccgtccggttgaagtgtgcatgcttggtcaaaccgaatatagttggaatgggaaggaaagggatatacatgagtatgtcgggttgctaggtcgggccgtcccagtagatcgactatcgagatgattaactttccagaagataaccggtggatctagtgcgtcagaggaaagcgatcggtgtcggaaacctactcttccggcggtggttttttattttctaaggctatcgagagctaggtatcttgaatccgcctga

SEQ ID NO: 195245 - DNA, 292 bp, Arabidopsis thaliana landsberg
atgaactctctgctctcgggaatcaccgtggacgtcatggctaaaattcactggaccgtccggtgtgcaccggattgtccggtgagccaacagcgcccgcgccaacggtcggcagcgcgatcaacgggcgacgcgtggccagagccaacgatcactaggctgcactagactgtccgatgtgcaccgaacagtgtccggtgtgccaaatggaccgagggttcaacggtcggcttcgttgaagaaggaaagaaatcgagcaatgttcatgtctggtggtgcatcggactgtccg

SEQ ID NO: 195246 - DNA, 246 bp, Arabidopsis thaliana landsberg
cggggactccttcatgggtcctcgcttttacaatggatcaatgatgctgttaaaaacttcactttcacgcccaagctgttagaagtgtcgttactgaacgaggaaggcaacaaactggttacatggtcattcagcaatgcttacccggtgggattgaaagtgacggattttaaatcgcaggataattcgatcgtggtggaaacgctcgagatcgcctacaactactttacgagggtggatgtataa

SEQ ID NO: 195247 - DNA, 322 bp, Arabidopsis thaliana landsberg
atggcaaccctgctggcctgcttcgaggaggcgctggacgacgccgacgcctgggtgcggcgcgccgcccgggcgccgctcgctacgtcgaccccgtgcgagggctgggacctcggcgcgctgctgggtcacatgatcggccagaacgagggcttcgcggccgcggtgcgcgccggcgacgcaccgctggcggcttacgccgcacccgtcctcgcccaggacgacgtgctggcgcgctggagcgactccgcgacccgcctgcgtgaggcgttccgggccgcaccggccgaacgggtcctgcgactggccgagttcgagggcc

SEQ ID NO: 195248 - DNA, 215 bp, Arabidopsis thaliana landsberg
actttacgaaattcgatgttgttcctcgttggagctgtcaagaacagagattgccgcataaattgatgaacatcttctggaatctggaaagaattagctccaagaatatgaattttgtaaactacgatgaatcagtgaagactgtgagagtgagagacatcaagagcacctgtactggtaacgcgcggattcgagaagctctgaggagaagataa

SEQ ID NO: 195249 - DNA, 83 bp, Arabidopsis thaliana landsberg
atggcggtggcgcgcgtcaccggtaggctccgcagccgccagccgaagctcaaagcccacgcagtgagcgtctgcgctacgcg

SEQ ID NO: 195250 - DNA, 1613 bp, Arabidopsis thaliana landsberg
atgcttgatatgctggccgaggactcttctgatgctgctcctgctgggacattggtggtggcgcctctcccggaagctggtaaaaccttggatattcagaggcctgttagtgttcgcccgaagcgcccttgccgagccaatcagcttgatcctcctgctgatgagcagaaaaagaaaaagagacgtctccggcgagtatctagcttggatcgggatgttggtccttcggttcctgctgctgaagaagttcacgtgcctgagcttactgtcgctgaccccaatgggtgtgatccgtctgttgctgatcccaatgggtgtgctccttctgctgctgaccccaatgggtgtgttgtctgtgttgccgatgaaaacgacggggaggaagaagatgaggtccctttgactcggaagaacagtcagcaatatgccgccagtggtgaaagtagtggagttccttctcctgctttgtctgccctcatcagtctacaagaattgtccctggccaactttgatcagactctggaggatatggtcccagaggacctgttatcggagccagtggatgatggtgcaatggaggcttgcgctgacgtgcccgatgctgggttgaggtcatcccgtgcctcgtcgaccttagagcacgatctcgagggccgggagactgacttggatcgtcctggtcctatggaagtagctgagggcccgtcaaccttagaggtggttactgcagagagcttggacctcaagaatggtgctgacacatgcccagcccccgagggtgtcgccggggatgacttagctcgggtgaagagtgtaagccactgcccagcccccgagggtgttgccggggatgatccggctcaagtgggcagtgccaattgtgaccagcccccgagggtgtccgagcaaggtctccttcctgcacttccatggatgttcatgcgggttcacctccacactctggcggtatagtggtggcccaaactctggatcagggggtcgctttagagggcagcatccccactggtctggcgttaggctctgctgaatgtattaagctcgttcctgctggtctactgcaaactgcttcgggtggtggtctgacacctgactatcagctgatttctcctgacttggggatcccttcgttcttttccaaccttcaggtactgtgctgtattttagcttgatctttatgttgcatgaattgctgtcgttatgctcatctgttttcctcattaggctttggtggatgggatggctagccagctgaggctacagggtgcttccgtcccagaagtagcattatcccttgcatgttggaatccagtgtcacttcaacatcgcgtctctgaattggaggcaaccaacgctggttagtgcctttttgcttctctttgccttcactgactgctttaccttctaaccccgttttgtttgattatcctttgctagggatgactcggcagatttcaactcttgaggaaaaacattcccgagatcaggctgaattggtccagcggtgtgctgacttcgaggagaagtactctcagagccaacctgagctcggtcaagtctctcccgctttcgatgatgccaatgcgctgagttaa

SEQ ID NO: 195251 - DNA, 142 bp, Arabidopsis thaliana landsberg
ctatcttcagattctccagcgtctcctggtgataatcagcatcgcaccaagagaaatcgaatcgagccactgcaaaaagaacgacacatcagtaaccagtaaagagaaccccaggcgaatcacgtatcaaatagtgaagtaa

SEQ ID NO: 195252 - DNA, 135 bp, Arabidopsis thaliana landsberg
gatgtacgacaccaccgaggcggcagctatgaagactctgatgactttctgcggctaccatccctggagatggtgatgcacccattgggactcttccccgctgaaaagagggatgaccccatgtggtgcaatcgt

SEQ ID NO: 195253 - DNA, 480 bp, Arabidopsis thaliana landsberg
atgtctgtcaatggcatcgccgatttgcctgggaaatcggtgtcgctcgatcaggctgacaatcatttctctggacgtgtatcagccacctccagcgagggtcagatccgtcctttctgacatcgcgcaatttgaatgtgggtgatgttcacagtgcgagcggtttacttctgcatgccaagggcgatttgactcaagtggatcaaaccaatctggttgcaagtggatcagccgatttgcaggccaaatcaattgacttgcaacagcttggcaatgaattctcaggtgctgtctctgtcagcacaacggatggcaatgccacgctgttcaacaaaagcgatcttcagctgaattctggcagtgttcaaggggttttaaatgttcgtgctgaaggcgccatttcccaaaagtcgggtggtgccatcgctgtggcggagcaaactgtgttgcaagccaagtcagtttgtgtggatcagctcg

SEQ ID NO: 195254 - DNA, 144 bp, Arabidopsis thaliana landsberg
atgaagcatctaatgacgtgtttttcggtggtatcaatgacaatggcacagatcccaaactggtttagcggcgcggagcttggttcgacgaaagacaatccatttccattgccagatgcttatatggcagctcagcagagaaac

SEQ ID NO: 195255 - DNA, 393 bp, Arabidopsis thaliana landsberg
cggaggcaacaggtgccgaatttggcgtatcgccgacgagacccgtgccgacctggatgaattcggcgctatctcccggacgggtcaggccaagcggcgtttgtgtagatggattgaaattactgaacgcacgatcgaaatcgaatgtgaagttattgaggagctcgctgatgcgcgacagttcgacgaaagaaaaaccgtaattcgtcagattgccgccatcgataccggcggtcgtctcagacaacacgtcgctgacgtcgcgcccctcttcgatggctttgatgatggtctggatcgtggcaaggtcgatggcgaattcggtggggtcggtttggtctgtggcaaagatcagctcatcagtgaatttgaccgtttcttcgaaagcgatct

SEQ ID NO: 195256 - DNA, 99 bp, Arabidopsis thaliana landsberg
gctggtccaagaatctgtcttggcaaagatttcgcataccggcaaatgaagacacttgttcacttctttcgcttcaaaatggctgatgagaagactact

SEQ ID NO: 195257 - DNA, 97 bp, Arabidopsis thaliana landsberg
gaaccttatcgctaaactcaactctggccacgttttatgaaagcataaacttgatgatccttgatcggtggtgcgaaattgaccatggatcctctat

SEQ ID NO: 195258 - DNA, 378 bp, Arabidopsis thaliana landsberg
atggtttccaggtggctggataaacctgcactgggacaactgatctggatgctcgcgctgctgatgatcattttctccgtgctgggagcagggctggaacatattgccgtacagaagatcgccaccggcgccaatcctgcacaactgctgcctccctacctgatgcatgtggttacggccatgctgctgttcctggtggtatgcacaattgttgtttgtattaccggaattgatgcggccggtatgcagctctttgtactgctggctgcggcgcaatgcctgctgttcctggccaatcctttcaggcctgtggccaatggcatgcaaaggttccgggtattctttatcatgtcatccgtagccaacctgctgcggccg

SEQ ID NO: 195259 - DNA, 81 bp, Arabidopsis thaliana landsberg
atgctttctttttacgactttgataatacagatacagaggtgtccctgcaaatccgccacgttatgcaagacacggagaaa

SEQ ID NO: 195260 - DNA, 245 bp, Arabidopsis thaliana landsberg
tagatcctgttcaagaccacacgaccgatgcttcttccgaacctagaaacggcggaggagaagatccaccattgacaaaattctctttttccgctctcaagacggccacaaatcattttagtcccgaaaacatcgtttcagatcaaacctccgatgttgtctttaaaggacgtttgcaaaacggtggtttcgtcgctatcaagagatttaataacatggcttggtctgatcctaaactatttttg

SEQ ID NO: 195261 - DNA, 555 bp, Arabidopsis thaliana landsberg
ctccttcggtttcaacaccgggcccgatgtgcgacccggggattggtattgcaaccttggggattgtgggacacataattttgccaataggtccagttgtttcaagtgtggtgccgcaaaagatgagttttcatgctcaagtgctgctgcaacaaccgggtttatggacatgaatgttggtccgagacgtggcctttttggttttggcggcagcagtagtggtggtggtggtacgggccgttctccttggaaatctggagattggatttgcccaaggtacttttttgtttgattgtttctatgtattgatgttatttttttgcaataatatgttttgatggttaaaacttaaaaccaaaaaagaaacatgcatgctggcttacgtaagctaaacacgaccgtttaaattgtattaatgtatatgcatatcgtagaaactgattggtttaatttgtatattataggtcaggctgtaacgaacataacttcgcaagcaggtcagagtgtttcaggtgtaacgcaccaaaggaacttgccaccgaaccaccctattag

SEQ ID NO: 195262 - DNA, 416 bp, Arabidopsis thaliana landsberg
atgtcggcgctgggcgacgaggcgatgaaaagcgtgccggtagtcgagcaggtgtttgtcaccgccccgaccgacgcacacaagttcacctttgagctgaaactgttcaaggcccgccgccgcaccgagaagctggtcgccgccgaaggcgacaacgagttttatgtcacgcacctgtcgtgccgcgtgctggtctataaaggactggtgatgccggagtatctggccaagttctacccggacttggccgatccgttgctcgaatcgtcgatgtgcgtgttccatcagcgcttctcgaccaacaccacaccgcagtggcgcttgtgccatccgtttcgttatctcgcgcacaacggtgagatcaacacgatctccggcaaccgcaagtgggcgcaggcgcgcgccaagaagttcca

SEQ ID NO: 195263 - DNA, 306 bp, Arabidopsis thaliana landsberg
atggtggtgcaagtattgaaaaagattgcacgtagcggcagcatcgtaattatgtcaatccatcagcctagtggtcggattatggagtttcttgatcgtgtaatcgtcttatcttctggccagattgtgtttagtgattctcctgctactctccctatgttcttctcggaatttggtagtcccataccggaaaaagagaacattgcggaattcacacttgacctaatcaaagatcttgaaggatctcccgaaggaacaagaggtttagtcgaattcaaccgaaattggcaacataggacgctaaga

SEQ ID NO: 195264 - DNA, 1103 bp, Arabidopsis thaliana landsberg
atgacggtgtccgcgtacgatacggaccagattgtgatgattaacaagaccacgaaagacaaaagttcgatattgtagctacaagttgcatcaccttaattaaatccatatggtaattaacacttagatataaacaagaaggtggttgcattctgtggtgggctaggttgattaatttatcttatatgatccctaaacctcagtgcttaagtacccaaattatggaaccaaccaagtcatcttagtattttttaatcttaatttactctaataatcatcatgtatataccaatttgatgtatatattagtcggcgacatggatgccacatcggacattgttgaggatacaccacccctgtagattgttatgatatttcctcattattttaacgtatcgttccactaatctcactctcaatatccaattacaaacgggactatttagtctgatctactctaggcaacatataatattaattaaagcccaagacacatgatggagttaggccttaagctagtgattttagatgacatgtaaaccaccatacaaaaattaacacaccttcacgaaaaaaagttaaccacacggcaattataaacgaataaatgacgtggcggagtcaagttacacacgcgttcacacaacattggttgactttataagtcaaacatcataggcgccaatgtccaaacgtttcattttctttttcaaacgttagttaggcagaaactataaaagagatactgtctctcttcgattgtataacataatgtttatatatatgtgtgtatagtcaaacaccatttttgattctttgttgtctcaaataaacacacatacaaaaaaaagatggattcttgttctttgttgtttgtctcgttcttgatcactgttatgaccgttcttgcttctaaagagaacgatcatgagttaataaaaagtgatcaaatctctttgctttctttcaaatcatccattgtttcagatcctcaaaactctctaagcagttggatttcttcttcttcgtcttcgtcttcgtcttcaatgctcgttgatgtttgtaattggtctggtgtgaagtgtaacaaagagagtactcaa

SEQ ID NO: 195265 - DNA, 267 bp, Arabidopsis thaliana landsberg
cagctcaaatacgccactcgagacggcgatgtcaaagctttcatccgcataaggcaggccatccgcctgcgcatcgacgcatttcagctcatcggcgatcttcttctccgcgcatttatcgagcatggcctgggacagatcgactccggtaatggagcaggaaggaaacgcctttttgaccgcttcgctcaacagcccagtgccgatgccgagatccagcatcttcatattttcacgggagccggaagctttattgaagaaaagtga

SEQ ID NO: 195266 - DNA, 130 bp, Arabidopsis thaliana landsberg
gtggctatcgacggttcacgaggtagcggaccaagggggcaccccacgttctaggttttatggggagggcgagcccggagtgatcggagctgccacagccatcgtgaggagcagctccggtggtttcgcg

SEQ ID NO: 195267 - DNA, 24 bp, Arabidopsis thaliana landsberg
acattgaatgtctttgaagattaa

SEQ ID NO: 195268 - DNA, 271 bp, Arabidopsis thaliana landsberg
atcgtactcatatatcaatgccccgcccggtcttgaatcaaagattatggaatcaatgtgctacttcttgtatgaaaaagatggcaagagaaccctaaagccgcctccaaggggggatatcagcaccgatcttgtccgaatcacactccagctgactcaggagaaagtcaagaaacttaaggagcgagccaagcaagaatcagcgcgctctctacatgatctatatttctcaacgttcgtcgtcacaatggcctatctctggagctgtctg

SEQ ID NO: 195269 - DNA, 56 bp, Arabidopsis thaliana landsberg
ggctctagccgctatatgatgagacagtaccgcggcaggcgtcatctcctagaacg

SEQ ID NO: 195270 - DNA, 274 bp, Arabidopsis thaliana landsberg
tgcaaggtgtggagaccttctgcatgatcggctggcactcgaccgtggtcatcgccaaggcatattcaccagggtctgcccgtcgatgccaaacgcgcctgggcgcttcatcgccagttggcgtttggccgccagacaaccggcctgaacgcctatcgcggctttggaaacattccgtgcggcttggaaggtgaatcagtctccaagacggtggaatatgcatatgacgactgggccatgtcgcacatggcccaggccgccggagactatatga

SEQ ID NO: 195271 - DNA, 86 bp, Arabidopsis thaliana landsberg
gtttaggcctcgagccccattctgatattttacatattcgagtcgagaacaggttgcttctgatccgaatccgaaactataagtaa

SEQ ID NO: 195272 - DNA, 663 bp, Arabidopsis thaliana landsberg
atctggaaaaagcttgagaaatgacgagcctaattacggatcagattcttcatctaagaacacaagcagcagcaacaaccctattgagtatacagagcatgaacgagctgagcttttaagaaggttagattctatcaaagatcatctacttcgcggtggtggtggtggtaataatgtagttgataaacctaaagaaccagatcagaatcagcctttccttagaccagttcatcttcatggtcatgctaatcataatcctggtccttcttattaccatcagtatccagaacctattcaataccctggaccggttcatggaatgtatcctcaagcttatcaagatccttatgggtaccaaagaagaccacctccagttcctaatccaaactggtatcctcctggtcattaccctaatcagatggctcgtcagtatcctggaggtcaatatgttgaacttggtcctgatatagttgagccacattcttactatccagctactcctggtaggtacggtgacctgcctccgtatagcccggtttcgtctcaccatcgtgaagagaaactcgctacacagtacagtgatatgcctccgtatagcccggtttcgtctcaccatcgtggcgagaaactcacgacaccgtatagtccacgtgttaataacgg

SEQ ID NO: 195273 - DNA, 51 bp, Arabidopsis thaliana landsberg
atgccgaagtgcgactacgtcttgcaaaccgcgatagacaaaatccggctg

SEQ ID NO: 195274 - DNA, 268 bp, Arabidopsis thaliana landsberg
  unsure (1)..(268): unsure at all n locations
atggggccatcggacctgtttgcggctaagaagaaagcggatgaaaaagtgcggatgggaattatcggaacaggccttcgcggccagaaccacctgaaccttttgctcaggagggnnnnnnnnnnnnnnnnnnnnnnttgcgatattgatgaccgcatgctcacttctgccaagagcaggatcaccaaaagcggcaggaaaatgcccgatgtgtttaccggcagtgaatatgcgtggaagaaaatggcggagaccaaaaaactggatg

SEQ ID NO: 195275 - DNA, 921 bp, Arabidopsis thaliana landsberg
atgacaccttctaatgagaaagtccacgccctaacatttaaagaatgtaaagagttgactgacgtgaattcagagttctgtaggatcaaagtggatggacaaggacgagaaaggtgtaggactattgagcggccgttctaacgcaacatttgtttaatgtggtctgtaggacatattcgagacacggtcactgataacaggagactccccacgattttcaaacctctccaccagatttgttcttttgtttgcttgaggacaagtaaagtctaagtctaggggagttgataacacgggtttttagcctgttttagctattgttttcttatgtttcaatgagaatttggttctattctagagccaataagaggagaaacacgtattctaggtgccaagaaggttttaagagttttgaagctaaagtaatcaaaagacgatcactccaacacttcagaagtttagcatccggctgaggtcttccccatcacggcaaggagatatttctgtatgtaagagtcaggagtcaagttgaagtcgaattaaagcaatccataaagccgtttagaagatatgaaccaaagagtgaagacatgccaaaaaccggttgtttggaaataataaatccaaaaagcatccggccgaggagacttgaacccgggcagctccgagaagctttccaccgaccattaggtcaagcccaagtcaattcctcattgtgccaccgtcatttggctccttccctgatgcccacgactggccctatcacttacttatccggcggattgacgtttttacctctaaacctaattcttggccctcaagtacaaatacttgttataagccctaaccctaggtgtgccttcatcaaaagcaaaccctagccgtcgccgagagctgccgactcgccgccgcaactcttga

SEQ ID NO: 195276 - DNA, 106 bp, Arabidopsis thaliana landsberg
atggagaaagcagggttcaagattcgtctatggcgaatccaatcatcaccttggataaaggaaagtcctttaccgaaaagtatgaagacctcaggtcgtttcaccg

SEQ ID NO: 195277 - DNA, 190 bp, Arabidopsis thaliana landsberg
atgaagaggtgtccggttccagatgactatgatgctcgtcgggttggtccgtgtattaaacggattttaaggaaatcaggctacaatggtcctgtcaccatcactgctgttggctcactatcaaaggtccctcgtgacatccttgaagtggtctcttccactggaatctctctttatcacgaggtcgcca

SEQ ID NO: 195278 - DNA, 213 bp, Arabidopsis thaliana landsberg
atgtcgccctcggcgaaccgcagccgggggtggtcgcggcgcgcggcggcgagcatgcccggcgacaggtcgatcccctcggcatccaagcgcgccgtgtgcaggaacgccgagatccgaccggtgccgcagccgatggacgtaacagggccagatggatcggaggtcccgagttcgggaccggcgagttcagaggctgcctatccagcgccg

SEQ ID NO: 195279 - DNA, 188 bp, Arabidopsis thaliana landsberg
atttcatagtttataacttttatgtgacgtacactactttctcatcggattcgtcggcatcagaaaaaaaaaaaggcttttatcttttaataagatataagatttggccgtgtgaaaaagtcatcggcgaaagggggggactagggaagacaatctcgagggtcgtgtttcatgttcgcttgatttga

SEQ ID NO: 195280 - DNA, 322 bp, Arabidopsis thaliana landsberg
gcccactcatgcagcacgtcccggcaatctcgctgtggtcccgcccggacacggagatgtcggcctcgaccgcacaccacgcctccggcgtgatcttccagcgcacgtccttcaggtcggcgctcatgggttaagccgcttcgctctggcgggcagcgcgcacccaaataagacgcgaggcgtcaagcagcggatcggcctttgccatgcgctgcgcgagcgcgtggccgataccgcggctcccattgcagaccccagcgatcgtggaataggggatgccgagcctctcggacactcctgtcgggccgccattcgcggccac

SEQ ID NO: 195281 - DNA, 79 bp, Arabidopsis thaliana landsberg
atggagattaataatgggactttcatcgtcatcgacattgaaggattcagtataacgagcagcatcacgagcacacctg

SEQ ID NO: 195282 - DNA, 237 bp, Arabidopsis thaliana landsberg
ctgtcaccggcaagctcaagccatgcttcttcgggccgtaccgcatcaccgagctgatcaacgacgtcactgtctgcctcgccttgccgcctcgagcccgcattcacaacgtgttccacgtggggatgctcaagaagttccaggggccagcgccggccactcccccgcccctaccgcctatgcatcatggcgcaagggcccctgagccagaacgcgccgggcatttccgtttggctc

SEQ ID NO: 195283 - DNA, 431 bp, Arabidopsis thaliana landsberg
aagtgatcgattcgccactggccgcggccttgccgccggccttcttgatttcgtcgactaccgcctgcgcgacgctttcatcgaccccctcgcccttgacgctggcgccgatgtcgttgaccactaccgccgcgccttgcgcggcaagttcaagggcgatgccacggccgatgccgcggcccgcgccggtgaccagcgcgactttgttttcgaggttctgcattcaaactctccggatgggggatgaaaaaatcgcatgccagcgatgacaatatgcaattctacccgtccgtatgcctggagcgcgtccgcccccccctcgcgggaatcgacatgctgctcagcttcctcccatcttgaggcccgcttccttgatgacgcgcggccacttcttgatttcggcgccgatgaaggcgccgaattcttcgggc

SEQ ID NO: 195284 - DNA, 180 bp, Arabidopsis thaliana landsberg
tattttttctaccctgttgggccgggtgtgactcaaaatctaataattcgcacgactgcttggggatgcgcaatctcatacaaaatggagacacggtttctatccctaagtcttcggttgctcagattgttttcccatttcgcgttcaggcaatcgatattgttgatcattcaatcgctg

SEQ ID NO: 195285 - DNA, 117 bp, Arabidopsis thaliana landsberg
atggacatcgttggaccattgcccccttcacgttcaaagaaatacttgctggtgctaactgattactttactaagtgggtcgaagcggaggcctaccacgaattgaaatccctgcag

SEQ ID NO: 195286 - DNA, 163 bp, Arabidopsis thaliana landsberg
tgcccacgggtgctaacgcccttacggctgcggccggtgcggcccttggttccatcaaggccatatcgaacccgttcattgaggcagcgggcacggccggtaaggcagcaatcgccaccatgctgccggatgacgtgccgtataagacgctgctaactttcac

SEQ ID NO: 195287 - DNA, 61 bp, Arabidopsis thaliana landsberg
gtggatttcaactgtttcgacagttacgtcacgaacaaggcgaacaacagacataaaatga

SEQ ID NO: 195288 - DNA, 579 bp, Arabidopsis thaliana landsberg
atgccgggagtcccaagagaactggccgagcacaaattgatggtctatccccaggcgaggccgatccggcaaaagctacgtcgtttcacgcccgacaagagagaggccattcgtgccgagttagctcgcttggtcgcggctggatttattagagaagtgtacaccccgagtggtagccaaccctgttcttgtactcaaaaagaataaagtggattggcgcatgtgcgtcgactataccgatctcaacaaacactgtccgaaggatcccttcaggctccctaggatagatcaggtgtggactccaccgctggatgttctgtgctgtctttcttggattgctattccggataccaccagattagtttggcgaaggaagacgaggaaaaaacggcgttcatcactccgtttggtgctttctgttatacctccatgccgttcgccctcaaaaacgctggagcgacttatcagagagccatccaaacgtgcttagccgaccactggggcaagcgtgtggaggcctacgtagatgatgtggtaatcaaaacagagaattcggaaaacttcatcgaagacttatag

SEQ ID NO: 195289 - DNA, 208 bp, Arabidopsis thaliana landsberg
cccggtcggtcgtggccgagtcaccaccgccattcgtcggagtcgcacagccctttcgcgccgtgtgcagtgccctcgccttaccaagcgacgtcgtgtgcctgcgcagccccttcaccgtgtgtccacgactcaccatcgccaccatcgtgctcggcggtttccaagcatcgacgaatgaccgacgacgcgccatccatgtccgcac

SEQ ID NO: 195290 - DNA, 571 bp, Arabidopsis thaliana landsberg
agtaatcaagaagaagatcaagataatggagacgagacaaaacagtgttcagttccaaagaccaactttcttaccaatgttaagtacaagaccttccatcaagaacgtgaccctcccggctaaatcacatcaagatgactcataccaacaagccgatcctttatctcccaaaatcagctgcattggtcaagtcaaacgtagcaacaagatcaccggcttccccaccaccaccaccacctccacctccatcacccccgtcgctcagcaccgttacttcaagcttaaacgtcttttctccggcaagaatctctctttctccgctcccactaccaccactaccaggactagtcgtggaagaataagaaaggaggagtttggtaacaaaaagattgatgttatcgacgttgctgaattggacccacctttgccggtggttaaaaagacacacgacggtggcgccggagataaagcggcggagaatctttggaagaggagatctggtggttgtcaactacggagtttgcagattcaaaccaatggagttcatcagctgaaagttacaactgtttga

SEQ ID NO: 195291 - DNA, 109 bp, Arabidopsis thaliana landsberg
tggctgctcgttcgaacgtgagggagaggaaccctcgacctcgcgtactagggtgcctgcaaaggtgcagctgttcggggcagacgacgtcaccgtgaagaccatccag

SEQ ID NO: 195292 - DNA, 131 bp, Arabidopsis thaliana landsberg
atgggcaatcccagtccttcggtggttgagatcggcagggtgacgaaagtttttcgatatcgctcgcaggagcgtgcccagtgcacggaaggcatttcgctatatccagccgagaacaaattgagcacagg

SEQ ID NO: 195293 - DNA, 306 bp, Arabidopsis thaliana landsberg
atgaatgagtcaaggatagatgggaatggtggttatgttaggattatgagagagttagaagatatgaagcaagaattgagtaagctgaagcttgatgtagtgtatgtttcgagagagaaagttgtggcggagaaagaagtaatggagttggagtctagaatggaggagaatttgaagttgcttgagagtctcaagttagaagttgatgttgcgaatgaagaacatgtattggttgaagtggcgaagatcgaggctttgaaggagtgtaaagaggttgaagagcagagggagaaggaaaggaaggaa

SEQ ID NO: 195294 - DNA, 304 bp, Arabidopsis thaliana landsberg
atggtgacaaacgtggaaggcgatatgaattattgttgcaaggttgatcttaagccttggcatttttggaacaagaaaggctacaagtcgttcgatgtggaaggtaacccggtagaggtgtattgggattttaggtctgcgaaattcacgagtagtccagagccgagctcggatttctacgtggctttagtctcggaggaagaggtggttttgcttgtgggtgattacaagaagaaagctttcaagagaacaaagtcgaggcctgctttggtcgaggctgccttgttctacaagaaagaaaaac

SEQ ID NO: 195295 - DNA, 303 bp, Arabidopsis thaliana landsberg
atggtgaaacctatatcggttatcagatggcaaggacaacggttcaaaagactagatagtcccaagctgtgcgccattaaagaggctgttgtaggcaccttgaaacaattcatcagcttttttgacgcctttactagcagtaagcctaacgattgtgttgtaggtttgcatagtattctagctcgcgataaggagtttgagaacactcgcggaataaagtcattcgagggatctcttgatagagcagcaatccacgtgcagataaacaatcgtgatacttttaatccgaacaagattactcaa

SEQ ID NO: 195296 - DNA, 233 bp, Arabidopsis thaliana landsberg
atggcgaccttcgagcaagcgaccgacagcaccgcgacgaccgaggccggggggccgggcttcgcgtgcccgcccttccccgacgccgcctccgcgccggagctcgccttcaccgggctcggcgcccaggctcgcctgctggccgcacgcgaggtcagctcgcgcgagctggtcgagctgtcccttacccggatcgaggagtcgcagccccgcctcaacgccttccgcgtcgt

SEQ ID NO: 195297 - DNA, 177 bp, Arabidopsis thaliana landsberg
cacaattttgtcagtgctgtaaggagcgcagcgacacggcaatcccgtgttatgaaaccaactacgggattggcgcgctacgctcgcaatgacaaatctttattctttttaacgtactttcaaagttcccgccggaattttaagcccagaatgacaaatgttgcaggcataggtaag

SEQ ID NO: 195298 - DNA, 187 bp, Arabidopsis thaliana landsberg
gctgcgcattttgcttacgtgaaatctcatggtgagcgtacgcatgctctagctctgcttgcaaatgaactataccgtcatcgcaaaagtagagatcaacgagtttgtcccagttttctccaaatggttacccgaatgtatgatgatctcggccatgctgctacatcggttttatggagaaagactg

SEQ ID NO: 195299 - DNA, 364 bp, Arabidopsis thaliana landsberg
gctgcagagcctatcaaactcgtctaggtggtcgagtggattcttcatgggaggtcgtgaaacttgttgccatgaaccatgccattacggtgattgtggttgcatggtgcatcgcctgcaccaatgttggttggtaattctgggttctggtcatcaaccatagcgtttgtgtttaactgttcccttaattcaagagcaatacggttcatgttatcgttaaaaaggaggttctgatgcccttgcgatcgagtttgcatgcactgagcaacaaccatacgttagcacggtccagaggaaattgagtaaagctagtgattcgcaaaacctggatcaaatcagacaaacaaaaaaaacacagagttag

SEQ ID NO: 195300 - DNA, 152 bp, Arabidopsis thaliana landsberg
atcagggcaaagcgcgacaagtctgttgcgagaagaagtttaagagtcacgtccgattggtcgacaaggagagcgccatggaacaacagaaaccgaaactttctttggtgtttggtcaacttccgacaccagaggaagtggaccagtttatg

SEQ ID NO: 195301 - DNA, 378 bp, Arabidopsis thaliana landsberg
ccaatcacggactcggcccaaaaacccatacccgtacccgaagctggtatcgaaccgacccgttacttctcgaactcattttccaccgtcggattctcgaatatccatgtctcacacccgacccgaatctcgcctccgcaatctacctcccttactacgccggcatcgattctctccgttatctctacggacccgatttaaactcaagcgctgatcatgggtcggatcttctcgagtttttgacccgtgatcaacccgagatctggtctcgtcgctccggtcatgatcatttcctcgttatggctcgacccgcttgggatttctctcagccgttgaccgttgaccctccgatttggggaacgtcgtttctagaacgcc

SEQ ID NO: 195302 - DNA, 457 bp, Arabidopsis thaliana landsberg
atgtcggagcttgatttgggatcagcgacgaattatacccctagttcctacgatcatcgtaatgaaaaagatagtgtaagtttttgtgtagcagtttttttcacatttttatacctatgctcatacataaactaggaaaatgatcatctatgaaatgttgttattttaatcagttgctgatttggttattgtatttgtgattagggttcaagtttgacgtggaaaggtggttatcagcagttatataatgttgacacgtcttccgacgaagaagatgaagaatcatgcgatgagaaggatgatgaagctggggaatatcactctgaagaagcgatggagatgtcgcgcgagcagagaatgagcgagctaaggaaagtgcttcatgacgatgaagatgacgtatcacaaggatttgtgaatgtgaggcgagagacaattgcgaagaatacggaatttg

SEQ ID NO: 195303 - DNA, 973 bp, Arabidopsis thaliana landsberg
atgacctcgtctctgttgaatttacgatttatgataactgcctctacgtaagttatgataacgtggccatatgcaactgatgatgaagttttataagttccttatgcacacttgccaaaagccacagaacttaagcagagctgatgcatcgaaaagagatagggatagtaaagaaagcatgccaataggaaaatatacacagcagtgtaggtctagtatcacgactgattttgagcaaatgagtgcagaaaacaagtcccttcagaagtactttcaaaccagatagaaaagttggaaatacctttttaagtggtggcccatccttctcaggaacaatatcgtggatagcaatcagtacctcggcaggtgtaagtgcagggcctgtgtgagcagaaccctatcacagatataacacaaaagatcggaatagttcagaaaaactacaggtgtgtaaaatatactcatgaaatgaactgttgttcctgttttgtaactggacaaaccaatctctcatttcatcagatattaaaatatcaaggcaatcctctatgcatagcatgatcagtgagtagcaattaaaggatggattggagaatatgcatatacctgtaatatatgagcaagtgcaagttgaaacttttcaggcggaagattaagaaggggaggaaagatgggcaaaacctgttacattgaaaaataatgtccgtcataaaataaggaatttccacaattgataggcaataacaaaacatcatctttcgcatccaccagcaaaggaccaaaatttttatcagaagccttccatgattactagttcttatttatttccatatttcagataggtaaaataacgagggaacaagatatataataaaaataacaagcctcttcatctttcttcagggtaaacgtacagcaaaagagcagaagctatggaaagaaagtaaaaactaacctcgtctttagtgagtga

SEQ ID NO: 195304 - DNA, 433 bp, Arabidopsis thaliana landsberg
acaaaaagcattggacgtatatgtgaatcagattctgaggttaccaaatgctacagaaaatccagatgtgcttgcgtttttcggcttggtcaatccacttgatgacattgcattttcagatcaagatagtccagcaaaatcccaaggagatgatctagaaagcagtttggtggatagtgatattacattggaagagtttgaatcagttctccttattggaggtgaggataaactcgaccagatttgtaccggtccaatgagagttactcaagaatatatgtcaaaattagcaactgaaaatccgcttgagagtgtattgcgtggaatatttcgggtgcacaacgtttcccccttgatccgtgggtttgaccgaatgaggcaaaacaagacttctttgactgaacaagattttcaaatgtggtgtgagaatcag

SEQ ID NO: 195305 - DNA, 326 bp, Arabidopsis thaliana landsberg
gcttaccctatcagcattttcgcgtgaaaaggtggccgctcgtgatcatccagactttcatccgttgggcggataccgcaaagtcagccgatcgcgcccgcgccgccaatgcgctcggccgcgcctggctgcaatccgacatggacgacgaggaacggcaggcggcgctgatggcgctcacctggctgctcgacgatccctcgcccaaggtccggctggcgctggccgaggccatcgccgatgccggcaatgcgccgcgttcgctgatcctgccactcgccgccgaccagccggaaatagcctgccacatcatcgcccgctcgccg

SEQ ID NO: 195306 - DNA, 427 bp, Arabidopsis thaliana landsberg
aagtctccagttcaagaagaagatatcaatgaaggagaaaagaaagattggatggtctcaaaaccggatcttgagattccaagaggatctttagatgtttctgctcaattgaaattacttgcagagaaagaaggccgatttagtaatagacaatctgatgagaaagagaactgtggcatggctgagtcagagatcaatggccgcacagctgaagaacaagtggatgaggagaagcctatactaaaggtatatatttatacatgtgtattattaagagatggtgattaagagttttctttctctctgacttttttttctattgttcttgatctgtaacagtctgtgaagaagaaatccaaagattcacaaccaaagagtagtactaaaccaagagtctctaagtacaattcatcggagaggactccaa

SEQ ID NO: 195307 - DNA, 104 bp, Arabidopsis thaliana landsberg
atgtcactcacgctggcattaatcatgtacgtgcggatcccggagatgcttaattgtgtcagcgtgtacatcgaccgtcgcaagcagtacagcagggcccgcac

SEQ ID NO: 195308 - DNA, 723 bp, Arabidopsis thaliana landsberg
gctatgggagccttaacatatacagcaaaagcagcaaatccctttgatcttagctatgatgatacagctccaaaccaaacaccacaagtatgaatcctagagttaatttcctgatagtatatatgatgaaaatgaaatatatatatatactcagttcctttctcttttctatgtcttttacagtttcctactatggcatatgtgcaaggaggaggcttacctcacgtgtcatctccaatagggtattcagattcttcaagtccagctgcagattccattggactgatgacctctcagtcaccttttcatgcaaccgctttatccccaaactctccagctcttgcatcccatctttcccctggtgagacgaaatttatgtaaaaagactgttttcagtggttggagtttatattctaagagttgaaatctggtgaacaggtgcactaatggggcagcaatcacaggtgaatatgtccccatcattcaggtacatacatactctgactcttcttaattagtgttcactgaatggttcttgactctaaattgattttggtgtgcaaaggcaagagtatagtggtcttggtacagaaggaaatacgttcaacggagtacatacatttcatcaagcaaacaatggatatccttctgcaaacccaaatgcttatgtatccagaggaaatccctttgaatgagaaacagcttaatgcagaagttttctga

SEQ ID NO: 195309 - DNA, 342 bp, Arabidopsis thaliana landsberg
atgggccacattccgtgcatgcagaggatgtgcgagctctatgaagactcgctaacctctaggcaagtaggcatgattttcgtagacgtgggtggactgagaacgttcaccgcatcgtttgtgtaactcctcttatatcgggaataagacagtgggggagaactctctataaccgagaactcatagcaacacacctccacaagctcacatgacgtagggtgttacacacttgagcgacccgaacctgtataatcctatgtgtcctgtcgtgcctagcacaaaccatcgagctgtgatcgacctcgctgtcctcctaaaagcactacacgggataccctttag

SEQ ID NO: 195310 - DNA, 376 bp, Arabidopsis thaliana landsberg
gtcaatggggcagtagagacttgcaggggtgaagatgaatgggtgatgtcaaagcgtttaaggaactacttcaatttctctcacccgctcatcgcaaagcatttagatcctgaagaatgtgcttgggcatatggtatgaatatcttcgatctacaagcttggaggaaaacaaatatcagagaaacgtatcactcttggcttagagaggtaactctatcgaataagcttacacttttttgtttttctttagcagaatctaaagttacctctctaatctactctgtttacttttgctttggaacagaatctaaagtcaaatctgacaatgtggaaacttggaaccttgcctcctgctcttatcgcgttcaagggtcac

SEQ ID NO: 195311 - DNA, 792 bp, Arabidopsis thaliana landsberg
gaatcgccaataccaaacgagtttcgtcggatgaaaaaacgagtaagctttcttctgaaacatggttacacaggctaatcaagttcaatttctgttttcatttgtaaaaaatatgtttcagtggttagtgatcttttgtcataagcacgggcaaagctaacgacgcgctatcaagaagtatccaaacgttgcttatactggtaagctatttttcgtaaagtacaactagcttagccccttattcatagatgtaagtcgcacagtttttcagtcttttggaccaaatctagtttccatggttgctgatactggaacagaacaaaaatagagtaaaggctcgagattcaagccaaatatttcaaaacacctagcacagtggcacctaattgaaccgaacaaatccaaaccggctttgtagagcaggttacgcaaaaagcagaaagactcaagcttctgcaagaactggtgtgtgtatttagtggctggcagctaccaaagccatgtgctctataaggtcaagaactcggttgctgtaagtaaaatgggagaagatttgtaagtgttagaactgttagctaggatgagaaatataagatgagaaacaaaagtgtacctgtaaccccattcgttgtcgtaccaagagacaagtttcacaaaggacttgctcaatccaataccagcattggcgtcaaagatactggacctgttataaccaaattggaatcaccacattggtcaaccacaaaaaaagattcagatgactatgaagaaaaggagagagaccaaccttga

SEQ ID NO: 195312 - DNA, 102 bp, Arabidopsis thaliana landsberg
gatctcatgaactgcatggctacacgcattagcctaaatgatgaatcactcgcaatgtgcaaccatatttgctttataaagaaattaactaatgaaaagtag

SEQ ID NO: 195313 - DNA, 106 bp, Arabidopsis thaliana landsberg
atggggatggcttttaggatggtctacaaccaagggtactggcctcatcgcacagacgggatgcatactcaaattgcaggttgtacactgataaaacatgccaaag

SEQ ID NO: 195314 - DNA, 105 bp, Arabidopsis thaliana landsberg
ggccgcaccgccagcaatgccggttacgtagttccccgagaaaatgcagttggtgaccaccggcgccgatgcggcgaagctaaacaaaccagcaccggagcctga

SEQ ID NO: 195315 - DNA, 351 bp, Arabidopsis thaliana landsberg
atgttagactcgcttacttacacagtaaagagcggtaagttatatgtaggcgttgcaggtcagaacaatgtaaaaaaggcaatctatacctcagtagacagaccttgggtaaatcttacgcgagctgacgcgacggcgattcaaaaactcgttaaagatatgcttgagaaagaactataaacaaatttggggctttgtgagtccctcggagagtgattatgtcagttaacgttagtgacgttaaagacagcggcgatgaaggtactagtggtaccgaagagaacgaagttgttagtagggcggcacatgaacggctattgaatcagcgtaaagctgaccgcgatagagcac

SEQ ID NO: 195316 - DNA, 175 bp, Arabidopsis thaliana landsberg
atgaagtacagggctgaggagctcggttacgagatagagtttcgtggtcttggcttgacaagtcgaaagaacttgtgtcttcacccatcagtaaagcgagagaagagcggctctgttgttgatgctcgctgccgaagccttacagctggcttcgtcaaggagaagaaagacaggg

SEQ ID NO: 195317 - DNA, 114 bp, Arabidopsis thaliana landsberg
gttgaaagaactgatcaacaacatcttgcaccgcattatcctcacgaggcgaagaaacttccggagcaaccgaagaagctagattcgactgagaagcagcagcagcagcactag

SEQ ID NO: 195318 - DNA, 242 bp, Arabidopsis thaliana landsberg
gggaggaggagctggcgcggaattccggggagaaagcacttgtcttctccggttctctctcccccgccgcgcgcggcttgcttgagtatgattcggctcgcagtgcggaagaaaagtgggagaccggaaccgagaggcgtcccgtcgtcgtccgtcgtcctcttcttccaccgcccgcgcggcgcaacgatgagggacccgcgggccccgggcgccacgacgggggcgcgctgcccgtgctc

SEQ ID NO: 195319 - DNA, 214 bp, Arabidopsis thaliana landsberg
atgacttggatctacaactatcatgaccatgatccggacgaccggactgcactagtcgttgctaccagccttgtgttcccgattctcgcgcttctggctgtcttgctgcgattttatgtccgaagatttactaatcgcccactatgggtggatgattatgcagccttatccagtgcgatattgataatagctcgggcaggcattctcatttatc

SEQ ID NO: 195320 - DNA, 319 bp, Arabidopsis thaliana landsberg
atggggacaggaggagatacaagagcaccagtttcaggctatagggctggtattgaaaagctaatgtgtatgaccatggtgcaaggtaatcaagaggtctttacgacttgcggattaatgaaaaacaaggagctgaaattctttggttctatctcgggacatcatgtgtctgtgcgtatcgactccggagccacaaacaacttcatgcctaaggatttagcaattcactttaagctgccagggaaggagacaaatctagtttcagttcttttgggtcatggattgcacataaagagcaaagaaaaatgcatgggaatag

SEQ ID NO: 195321 - DNA, 95 bp, Arabidopsis thaliana landsberg
ttcaactcagtgatggaagtatcaaagcagctctcaacgttgttccttctaattggcggtttggtcagagcttcaagagcaacgttaacttctaa

SEQ ID NO: 195322 - DNA, 43 bp, Arabidopsis thaliana landsberg
atgtgcgtgtgcgctcatgcgtctgcccgcgcgcacgagcaag

SEQ ID NO: 195323 - DNA, 1340 bp, Arabidopsis thaliana landsberg
atgcgttgtcgttcagaaagtgtgaattctttgtttgataggtatgttcaccctgaaacctcacttaaggagttcttagaaggatatgggctaatgctagaagataggtatgaagaggaagctaaagcagattttgatgcttggcatgaagcacctgagttgaaatctccatcaccttttgagaagcagatgttacttgtatactcccatgaaatattcaggagattccaacttgaggttctgggtgctgctgcttgtcaccttacgaaggagagtgaggaaggaacaacttacagtgttaaggactttgacgacgaacagaagtatttggtggattgggatgaatttaagtcagatatttactgctcttgccgctcctttgagtacaagggatatctctgtagacacgcaattgttgtcctccaaatgtcgggtgttttcaccattccgataaactatgtgttgcaaagatggacaaatgcagctagaaacagacatcagatcagcagaaaccttgaacttgtgcagtctaatatccgccgtttcaatgatctatgccgccgagccattatattgggagaagaaggatctctatcccaagaaagttatgacatcgccatgtttgcaatgaaagaagcttttaagcaatgtgctgttacgattaataccatcaaacatcccgccaggtgtgaagaagctgcaattcaagcaggagatcctgtccaggaagaaaatcaatatggatccacatcgacacagattggacccgaacctaacatacatgcaggcaatgttccatggcaagctgaaaccagaagggagaagagaagtagcctaaacaatacatctaaaaaggcaaaggttcactagcattttctactatgctgtcaaaatcatcgattaatcttttatgggtactcaataggctataatatcatacatatggccaaaagacaaacaaccatctctgctaagctgtcatagcctgatgatgtgatgcgtaactttgtttatgattgatctttcttcacttgtgcagcatgtggctcaatctgaaactgttggtgagggaagccaagaaggatttcaacatgtggtatgtttgatttttctatctgcatcccgaatgcaaaccactcagtgacatttggtgaacttgttcgtttcatatggataagtgttctgatcgttgtcaattacaggctgatccaagacagtcacaggcggtattggcagggcaattttacatcacaatgccaggagtattccaaaacttaattaacacgaacttccaaaacattccggctacaaatatgcaccagatcaatccccctgggtga

SEQ ID NO: 195324 - DNA, 220 bp, Arabidopsis thaliana landsberg
atgaactttgaaggggcacaagctgcatttgtaagtgaaatttgtcagcaagaaagcacttaacagcaactttcttacgaagaagtctatagtttcagagaaccttctctgtctcttttgttgactatgttgatactacgtcagtttttcgggaatgcactttccaaaggatgttgacgtgcattacggaaaacgatcttcctaccgagtctggagacag

SEQ ID NO: 195325 - DNA, 303 bp, Arabidopsis thaliana landsberg
atgaggcgtccaagtcttcgtgttcaacgagccaatgccggagctcttgctcgtgctggtgatctgtcggccgcgatgaccgcggctcaaaacattctagctgtttccagcgcatctgcctcagcagatcatccctcgcttcctgaggtcaacaccgggacctctactgcagcacgtcagtcaggtaacattctggttgctcaagtatctgggccatctgcagttgttcgttctgatggcgcaccgtcctctccgaagagagctcggacccagccggaggtgaatccggcggctgagttgctc

SEQ ID NO: 195326 - DNA, 500 bp, Arabidopsis thaliana landsberg
taatctcttttgatttggagaatcaaactttaaccgttgtcgatgagagtttattcgagggtcgatgcccaagcatgtccctgaacttcaccggggccaatcagtttacaatcgctcctacagtggagaagattgacctattcatttgtcctgcttctcagatggtaagtccgctttcggcgtttacttgcagaaaaagcaacggggaaattgtaacatattacgcgtttaagccctcagattctgttacggactgcgtaaagatgggagaatatccagttcttagttctcttctggatgagtttcagcggtcaaggcttaaattgaaagaagctttggttaaggggtttgatctaaggttcaacatcagagacgatcaatcttgcagaggttgttcaaatagtcatggagtatgcggttccgagccagtatctggcagttttcagtgtctctgctatgacaaactgatacgattgatgtatcaagaagaatgtgaatga

SEQ ID NO: 195327 - DNA, 321 bp, Arabidopsis thaliana landsberg
atggcaggccagaaattttcggattttggtagaatacaggaaaataccacaggtgagtgcaggtgtcttatgcgccttggccataataatttatttatcaagcagtttaaggctcttcaccaggtcaatacctttgcccagtataccggtaaatatatctccttttttttcaatacgtttcaaggcattgtggatgttaaaatccttggggcttaagcctggctttacctctttccaatccaatggcattgatacggttgccccttctttaggccgtaaactgtataccgaagaaatagtttgtcccctgcggttttgcag

SEQ ID NO: 195328 - DNA, 359 bp, Arabidopsis thaliana landsberg
atgaatatcgtctcttggaaagatgcaaacgacgaagttgcaggcggcgctacgacaagacgtgaaagagaagtaaaagaggatcaagaagaaaccgaagtcagagccaccagtggcaaaaccgtaattaaaaagcagcctacatcgatctcttcttcttcttcttcgtggatgaaatccaaggatccgaggattgttagggtttcacgcgcctttggaggcaaagaccgtcacagcaaagtgtgtacgttacgtggactacgtgacagacgcgtgagattatcagtcccaacggctattcagctctacgatcttcaagaacggctcggtgttgaccagcctagcaaagccgttgactg

SEQ ID NO: 195329 - DNA, 160 bp, Arabidopsis thaliana landsberg
atgaatcttcgattcgagaaccctaaactcacgaaacgacattgttttactgaacttcgatgcctcgtcattgccacagtattggatgactcatcgtcttaagcggttaactaacactgtttcagcatatgttgattttggctattttaatatagtctag

SEQ ID NO: 195330 - DNA, 576 bp, Arabidopsis thaliana landsberg
  unsure (1)..(576): unsure at all n locations
ggtctccttcgttcaccgttaaggtaagtatacttgagaagtatttacctaattcttcaaaaataccaatttcggaatctgttgttataagtttagtaacaaaacaattgttgaaataggtagctagtatatatatagtcttttaattacataaatttatgttgtttaaaaatgtacatcaaattctgaaatttgtggaaaaaatagaaggatgataccatttaagatcaaatcatcaaaattcacatcacattttagatggaatgtcagcttaaaagatcagaagcctttgcagtttaataagaaactaaaattaatctagccatcaagaaccaaaaaacaattgaacttacggtttatgtttcctttactataaaaattcaattttaggttaaaatgaaaggacatatataaacatagagagtccaatgtgtattttatcgtttgagcttaaatcgttatactaatatatnttattttttgtcacagacctcagatgaagaaagtatcgaatgtgtcgatatatataaacagccagcatttcatcatgatcttttaaaagaccacaaaatccag

SEQ ID NO: 195331 - DNA, 278 bp, Arabidopsis thaliana landsberg
atggataagaatcagattgttaacattgatagtaccaatggtgatcctcagctttgtgctacgtttgcttgtgacatttataagcatcttcgtgcttctgaggtgataactcttaaccagaatgtgagatttttagctttatgtgtttgcaagttttctgaatctgtgtatcatctatatgctaggctaagaagcgacctgatgttgattacatggagagagttcagaaagatgtgaattcgagtatgcgtggaatcttagttgattggcttattgag

SEQ ID NO: 195332 - DNA, 127 bp, Arabidopsis thaliana landsberg
acttcattttttctaagaatcctgaaagagaaaacgacagcgcatcaaacatattatcggatcgcttaatcaaacaaaagaaaaaaagttatcgaataatatacaaagaccggataggcgatagaag

SEQ ID NO: 195333 - DNA, 147 bp, Arabidopsis thaliana landsberg
cagtgggcactgaatgcgtgttccattaaacaaggtaacgggaagcgcattttggggtttcagcaactagatgaaatatattcaccatgctgtagtcgagacaagccaacgtgtgaatgtgaatgtcagatgcacaaagctccatga

SEQ ID NO: 195334 - DNA, 799 bp, Arabidopsis thaliana landsberg
atgatagataccacttcaaacaagcttttaaaaaggagagctgtttcggagactttgatgaaagggacttgtgctgagagtgttggtaagaagagaaagaggaacgagtatgatgatagttgcattgctagatatatcggtgctgtaagtaacaatagaagagggtctagtgacaatggagatgcatgcataggagaagagtcggcacaagcaaacatttctaaatgtgttgttggtccaaagtttaacgactttagtaagctgagggaagaagcaaactttaaagttggtcagacctgggcgctttatgatacaatggatgggatgcctagattgtatgctcagatcaggaaagtttcagctccttgttttggtcttatgattacatatctagagccagattcaaatgatgagaaagagctccaatggtttgaaaaagacttgcctgtttctgttggtaacttcaggcttggggaaaataagagcacaaaagatcgttcaatattttcacatgttattcaaaacaatgaacggagcaacgccagttgtttcagcatcacttgtcgtttcatcagtacttatcattttagtgtatctcttagattttgagagacttgggcgcttttcaagaactgggatattaagtggtctttaaaaccagattctcaccgcaaatatgagtatgaatttgtcaagattctgtcagattacgcggatgaaactggtgtatatgttgcatacttgcataaagcaaaaggatttgctagtgtgttcttccgaatgggaactggttatgaag

SEQ ID NO: 195335 - DNA, 24 bp, Arabidopsis thaliana landsberg
atggccgagaagggtaaggagaag

SEQ ID NO: 195336 - DNA, 273 bp, Arabidopsis thaliana landsberg
atgtccctggtactgaaactgtccagtttcatcttccaagatccaaggtatgttctttaacttctcctacaaaaattagaatccacacaaaactcattgtaaaagccatcaaaatgattggtaatgatccaaaacaaacacagaattacccgatgtgcatctgtaaactaacgaccttgcggtatatctttacgaagagaccttttattctcagaacctttcttgaaattaggaagaccagtcacaaatccaccaatgaagtagttcttatcc

SEQ ID NO: 195337 - DNA, 80 bp, Arabidopsis thaliana landsberg
atgcctggaccacgaggtgtagacataccggacattgtgctagctgagctgaaagtttcagtaacctatatgaaggcttg

SEQ ID NO: 195338 - DNA, 252 bp, Arabidopsis thaliana landsberg
gctgccttggtgcccagcgctgcggaccgggtgcagacctacgtctacgatgacgccggccgccaggtcatgcgcgtgaacgccaagatggaggtctccgcgacggcattcgcgggcgtgggcatggtagtccaggtgaccacatacgccaccccgctggcagcgccgggagcgacgctggaaggcgtggacccggccaccctcacagtccccaatctaagtagctatctctccgcgtcggtaaaagaccgg

SEQ ID NO: 195339 - DNA, 286 bp, Arabidopsis thaliana landsberg
ccgggccggcccgtctccacgcgggaactgctggaccacgccgccgcgcacctcccgcgcgcggcggtccccgcggcggtcgagcttctcgacgtgctgcccctcaacgccaacggcaaggtggaccggctcgccctgtcccgccgggacctgcccgccgagccggtccgagcgggggccggccgggtgtccggtcccgtggagtccgtgctggcgctggtctgggcggaggcgctcgacctcgccggagaggccgacccggaggcgagcttcttccacctgggcg

SEQ ID NO: 195340 - DNA, 429 bp, Arabidopsis thaliana landsberg
atgacgcgcggggcgaggattacccgagggatcagggttgcgagcggaatcggcactgggcatttcaggctccttgggggtgggacgccggttgtgagtggatggcgacatcgctgagtgctgccggaaccggagaatcgcacatccgaatgttcggtactgatcactccttcaggaatgcacaacctgtcgacagatcggatgtttgcacaggtatccacggcaatcaaggggagcaggcataattctcccattaaagatccgatctatattcgagtgccgactcatcgagtgatggtaaaggcggagaagcgacagatgccggacgggacgactccgccggtggcggtgaaaagactcgcgtcctgggccgtcgcgcccgggacggtggcggacccgagcgatgtccgggtcgtcccgtccgagtag

SEQ ID NO: 195341 - DNA, 300 bp, Arabidopsis thaliana landsberg
atgatggaagaggctaaaaccaggtctaatggggcaaaaaatggagtcaccaaagctagaaggatctacagccatcagggtaggagtgccacagggtaggtgatctgtgattccaaaggacacagctaccaccagggacactgcactgagcccctgaatgtggtggcaaagtgggacaggaatccccagaattcctcctaccccccagcttcccatcagacaacctgcttggatccagtgggcagggagtcagctttctgggaggcacagagctgactagaagagaacagcctggtggtg

SEQ ID NO: 195342 - DNA, 351 bp, Arabidopsis thaliana landsberg
gatcgagcgctacagccgttgctttgtagagctagagaaagtcaaagcatgccttccctctctagcaaggtaaacgtctgaagaatccataattctcattaattgtgtaagaatctatgtggctcaaatgattatgtgatggactttgtgtagaagaggaggtttggtggccaagtctgtgctcgaactcaacctagcatttcaggaagtttcatcataataactatgagtcttacaaccctggacaaaaacgcagagcaaaagcccgtcttcctcgtggaagaacctgcatcatcccaagtccccaaccatctgctttttgatgtggatttggttccaaagggagtctaa

SEQ ID NO: 195343 - DNA, 346 bp, Arabidopsis thaliana landsberg
atggacgtcggaagtctaccaagcaacggcgtcgcaacaatccaagactccgctcccaccgccgcaaccatactcggctcctctgcagcgactcttggacgtcacttatcccgccgtcttgtccaagccggagttaccgacattttcactgttcccggtgatttcaacctatctctgcttgaccagctcatcgccaacccggagctcaaaaacatcggttgctgcaacgagcttaacgccggttacgctgccgacggttacgctcgatctcgtggagttggtgcatgcgtcgtgactttcaccgttggtggactcagcgttttgaacgctatcgctggtgcataca

SEQ ID NO: 195344 - DNA, 143 bp, Arabidopsis thaliana landsberg
atatcaacaccacacaaatcctttacacaaagattgatcgcgttggagtgtacaaatgctctcgtcatgacaaatcaatgatctccggaaaaaacataaaaagagagctacttttggaatccttgtcgtgttccgttttataa

SEQ ID NO: 195345 - DNA, 105 bp, Arabidopsis thaliana landsberg
ctgacacgtcggatggtgacgtcagagagtcggcagaggagaagaggaagaggaggaggaggagaagaagaagaaggcaagtcattgtttgaagtgtttgtgtga

SEQ ID NO: 195346 - DNA, 181 bp, Arabidopsis thaliana landsberg
gcaaattcttcctgtcaccgttgcagccggtagggaactgaatgtcaattcgtcactcaattcgtcttatctttggcagcattgcaaagttttgaagttgacgaagaacatgagacatgaattttccaaatggatccttgcagtcggcgtgggaaaactaaatgagctaacgatggagtaa

SEQ ID NO: 195347 - DNA, 194 bp, Arabidopsis thaliana landsberg
aaggaggagaaggaggagagccgcgtgacggtggagtatcattgccaccattgtttcctccatttcctctttctcctccaccgccctgtgacggaggggaaggagagttattagaggaattaggagggttaggagcttgtggagctggtggagatgtggaatcaggaggtggcgatgatgatgagtctccttga

SEQ ID NO: 195348 - DNA, 60 bp, Arabidopsis thaliana landsberg
agagcaaccctctttcaatgccgttcgtgtgatcctgaccctcaacatccgctcgattga

SEQ ID NO: 195349 - DNA, 100 bp, Arabidopsis thaliana landsberg
gacgccaatatgaatggtgtctatgttcgatcaggtgtgtctagcatgctgagttttgacggatcagaaagtcgcgaaagtgtggatgacagtaagaaag

SEQ ID NO: 195350 - DNA, 112 bp, Arabidopsis thaliana landsberg
atggcccgagccatgaatctgtatcgaacatacaccggggtacgtcactcgtactagcgaagacggcggctatcgtaccttcgagggccggcctacgagaccatgatcggag

SEQ ID NO: 195351 - DNA, 52 bp, Arabidopsis thaliana landsberg
atgaacgtagaaacttaccaacgtgctgttggccgagtggtacatgttccag

SEQ ID NO: 195352 - DNA, 206 bp, Arabidopsis thaliana landsberg
atgggtgcaatgacaaaggtgagactgaagtgggtgaagaacaagaacctggatcacgtcattgatactgagaccgatctcaaagcagcttgtatcctcaaagacgccataaagcgatctcccactggtttcctcaccgcaaaatccgtcgccgattggcaaaaactccttggtctcaccgtccctgttctccgcttcttgcgcag

SEQ ID NO: 195353 - DNA, 89 bp, Arabidopsis thaliana landsberg
atgtggttcgacccttgtcgagactactgcttgaagaacggcaaatgtcaagattttgcagttaccagtaggtccggcaactttagaaa

SEQ ID NO: 195354 - DNA, 3071 bp, Arabidopsis thaliana landsberg
  unsure (1)..(3071): unsure at all n locations
atggctatgagatcgatggttctggttatgactatggtgctggtaagtggtattctttccgtttggaaagggtacatcgggctaataacttgggttaatgctaaaacctggctttctattagtaaataataatctgaccaactaaaagcaactgcttgacttatccccacataaagctagtccactacagccaaacaggatacttgctgagtatgttgatgtgtactcacccttgctctacacaccaaacccccccatccccaggttgtcagcattgcaaccactgctcaggagaagatgaagctgtggaaggagacttccaggagttccaagactacgacgagttctaggcgtgggttagcggcaaacctccagtcggctgcctgtgaaggccgcgtttatctacgtttcttttccgcactttgatttattgtaaggactatatggatgtctcagacgtatgatgtaataaattactttttcgctatttatttcgagcactgtgtgatgatgtccatgttatgtaactgctgtgtacgtgaataactgatcctggcacgtacatggttcgcattcggttttccttctaaaaccgggtgtgacataagtggtatcaaatccgtgctgactgtaggaccgctaacctagaatagaatggtcgttctaaggactatagacctctgtccctgccttgactttgatatcccttcaaaagttggtcataccgaccaaacctatgttctactatatattataccttgctaaaaattgtgttttattctaatccttcatttatttatgattcattatttgctggtcatattaattctgttctcacccttttgcttgcgatgtcttttgtagatggctcgacttagacacactgcacgaaagtcagtcatccccttcttaccctcctgccttgctgagcgtccgcttcgccgtcccgtggccggacagtccagccacttggagagactgcaccaccgcctgcgtgaggagcaggagcgtcgacgacaggagcagcagggctcttccttctcgctccagcaggagatagagtctgtgaggagctgctctcctgtgcttcctctggaggcgccccctgcaccaccactgggcgtcccagcttctggagtagctgctggaggagacccagacgacggagatggcgacgacagctcgagccatgacaccgacttctctgctaaccttgagccggaaggatgggttgctcgacccatcactcgcgacgctgctcgcgggtgtcacttccacgatgcgctcgacaccctgctacgtcgggcatttgaccggcatacttggtccgttgagtatcgctgtgtggtctaccagcatagtcgcggggtctacccggaccgctgggaggcaacttgcttggtgcgctgccggagaacagtctccagggtgcagaggcctgctcagagcactattctatctctgaacgggactcagctgaggcagccatgcaagatgctgcacggcgtcgnctttcgcactactgctcggttttcggtggggcagctgacggtcttgacctgaagtattacccccgccgtccatctggcagcacaggaggcgtgattgtctcacctgtcggtgagggcaatcctaggttgagcagcacagtcaacctagccgccgtgctaaacacggagctggaccatgcattagacgagctgagtagggctcgtgctgagatcgccctgttgcgggctgagcgcgcggaacgtcgttatttggatggtggttccccgctcccgtcgggactcagcacccgtaccgctcacctcagcgtggacaccagtcttatggcaatcccgcctgcaagaccaagataactctagaaccatagatcgttagagttggatcttgtaattaatacgaaatatatatacatagaagcttcagtcttagcgttaatctcggtcttagttagtcttagttagacagggtagtttgctgtttcctgtgcatttatgtttgtcatgatgaactatgtttggtttggatctttgtaatgattgtcaccagagtgtgggtatcccctgcattttggtttacctattatgttaatggagttagttatatagttgggaaaccttttattccactttcctctttatctgagcagctgtgtggtctgtgttggagatcagtgaagatgctcatctgttcagtgctgttgaagaattctattctctttccttatgctgcaagatttgccagatcagttctgatgtgtggttgcattctgcaaatgtcagagaacaggcgcagaggaggaaggcgtgctcagcaggagcgagccgctcaacaggaagaggtgccccagcagcagcacctgccacccccgcccccgatgtccatcgagcagatgtttctgatgcagactcaggcagttcaagccatcggtcagaccttggccgccattcagcagcagcagcagcaacagcagcaggccccacctcagcctcagatgcctcagatgccagagacaagcgtgctgaattcatgagaggtcatccaccaacgttcgctcattcttctgaccccatggatgctgaagannnnnnnnnnnnnnnnnngcgggagttgcataccgctcagtgcaacgacagggagaaagttctgtatggtccccgtctgttgagaggagcagctcagtcttggtgggagtcttatctcgccactcatgccaaccccgacaccatcacttgggaagagttcagaggtagctttcgtcagtaccatgttcctgcaggtctgatgatagtaagaaggaggagttcctcgcactcaagcaagggtcattatcggttagtgagtaccaggacaggtttctgcaattgtctcgctatgctcctaaagatgtcaacaccgacgccaagagacagtatcgcttcctgagaggcttggttgaccctctacagtatcagctgatgaatcataccttcccgacatttcagcacctgattgatagggcaatcatgatagagaggaagcataaggagatggaggatcgcaagcgcaagatcagtggaccctag

SEQ ID NO: 195355 - DNA, 63 bp, Arabidopsis thaliana landsberg
ataggagagacgccaatggtagacggacaaatgcgttatgaagatgtgacaatttatcgatga

SEQ ID NO: 195356 - DNA, 87 bp, Arabidopsis thaliana landsberg
atggtaatttatcctaagctgattcatcctcaccctcctcccatctcatcttcagaagaagactatacagacaaagcatggatgcag

SEQ ID NO: 195357 - DNA, 308 bp, Arabidopsis thaliana landsberg
agagaaatcaaaacgaatcagattttgttagaagaaaccacaatgcgattaaagaagagaaagctcgtaccattgttatgatggaatttggtcagatttttctaaaacgatcccggctcgacaatacccaacaacgggagaaacatcaacacaaacttttgaaaatccaatcacaacggatccatgataaaatcaagaaccaaaatttcactttcccagcttcaaaactttctgatcgacgtcaacaacatagaaacataaacgaggctacatgcgcaaaatttcgtgacgattgcagaggatcttaa

SEQ ID NO: 195358 - DNA, 43 bp, Arabidopsis thaliana landsberg
atggagaagggatcggttaggaccgtaaggttgagtgatatgg

SEQ ID NO: 195359 - DNA, 99 bp, Arabidopsis thaliana landsberg
gcaatggatgaaggcgatgtgataggattcaaaccagtaaactacttctttattcacatccccaatgaagagacagatttgaccaagggatgtagttga

SEQ ID NO: 195360 - DNA, 312 bp, Arabidopsis thaliana landsberg
cgtggtccacctggccgcgcgccgggcggccgacgcctcccggagttcgaaggagacgtcgtcgctgctcgggctggcccagaccgtgctcggcggcgcggatacgcccacggatgtgctcgatcacctgacgtccgcgcacggcggctacgcccggctgctcgagcgggtcagcggccggtgggtcaaggtcgccgccagcggtgactcgccgcccgacggaggcaacgtgatccggttcgaggtccgtccggacctggcgctgaaggcgaccggggtggcggcgtccgcgaccacgtccctgctggccgg

SEQ ID NO: 195361 - DNA, 248 bp, Arabidopsis thaliana landsberg
catcacaacgcggttcgctcagaggcaaatgtgggcgccgatccaaacagtctaacttttcgtccaagcggacgcgcgagaagccgcgcgccgctcaactccggcctcaggcggcaaggatcgactgtgcagttccgagtcgaggccgtgacttcgcgcttcaggccagcctgagcgcgtcggcgagcggtcgtttcccgcggcgatccatcatcgacgcgaaggccccggggcggatgctgcgccgc

SEQ ID NO: 195362 - DNA, 354 bp, Arabidopsis thaliana landsberg
  unsure (1)..(354): unsure at all n locations
ttgaaaactaccatcccagtagatcttgacctaaccaaaacacaattttataaaatgtaagtttatagcatgaacaaagaagaaaccattcattatgtccatatctactcaacaaagataaaataggtcatcagcttccatattagaagtaagataaataacatatcactgtagcagctacattcaagaagaaaacatactntcttttgcgctttgctccaatgttgtagctcaagcatcttggaagaaacgatggctgcaacaacaaacaacaagttcaaatttaggagacaaaagaagcacacactcgccatgaatcagaccataatcagcttagcaaactcaaactattag

SEQ ID NO: 195363 - DNA, 81 bp, Arabidopsis thaliana landsberg
atcaaaggttgtccaagagttttagaagagcgacgacatcacaaaaatttgtttcatgatcaagatcccgtgggcaaatag

SEQ ID NO: 195364 - DNA, 168 bp, Arabidopsis thaliana landsberg
gaacccgtgatttcgctcaaggtccgcaatattgcattatattatccccgactcatccaccaaagcagagtctgtactaccgaagcaatgtctttccctccgcgcgggaaaggtcgtggatctagaaatacgggtaccgaggaggaatacgtgctcttcctccagggg

SEQ ID NO: 195365 - DNA, 150 bp, Arabidopsis thaliana landsberg
atggagtatttcaatagaatgaaaactgtttttggggttagtcctggtccggagcattatgcatgtttggttgacttgttaggtcgtgctggccggttgaatgcagctttgcgtctcattgaagaaatgccaatggagcctcctcctgtg

SEQ ID NO: 195366 - DNA, 209 bp, Arabidopsis thaliana landsberg
gcccaccatacaatgatgccggtgagttcattaacttgcaaagtgtgggaagagcgaggaatagtcagaatgctgagcaaggtcagactctgtgtgcctggtgtgcagcacagaggtgggcactagccatgtggaagacgtttgtgctggcatgggctctaagattggtcagattgataagccgcatgtggccagcgggggagctttaa

SEQ ID NO: 195367 - DNA, 66 bp, Arabidopsis thaliana landsberg
atggtggagacttttctgacaacgcaacttgcggagagcgatcaacgaatgccgaaggaattttcg

SEQ ID NO: 195368 - DNA, 110 bp, Arabidopsis thaliana landsberg
atgagggagaagtacacaaaggaggaagcagtgaagtattgggagaagaagaagaacaagccttcttcaccaaaaggagttggagagtttctgaaaaagaagaaaggaag

SEQ ID NO: 195369 - DNA, 479 bp, Arabidopsis thaliana landsberg
atgcaaggctcttatgatttgattccatggaggttttctacggggtcgcctaatatatcggaaagccaccaatcgtgtgatgaccaccggaaactaataataaatgttagaactgacatataatcgataaaatatgtccgaagaaatacgacatagctgttggaaattgcatttctgttagagacacaacacagcgaaaggctcatattcacttccatagatcgtccaccatgtatgttgaacatagacattttgaatccatacataactaatttttcttacagatctaaaagtgaactaaaatctacaaaacaaacaagaagagaattcggatttagaaatccagaattgagagcaaacactttacttagattaaaacaaaaaccaaacttaaagagaagaaacagaaccgccgacaagtgccggcggccctaaaccaatcggagaagatggaggccaaggaagagaacggttacttg

SEQ ID NO: 195370 - DNA, 180 bp, Arabidopsis thaliana landsberg
gaaagagcaaatgtaaaaagaaaaagaattaccgaggatgtgatgagccatgtcacggaagcggaggtaacggctgccgagagaagcgtggtgttcgagagtaagagaaagaagagtgtacgagtagaaagtaacggctgctcctccgaccagacagtatatcccggcagcccatcctaa

SEQ ID NO: 195371 - DNA, 82 bp, Arabidopsis thaliana landsberg
aagccggccataggcgaacacagagtgccatcgtaagttctattttctatttgcttgtctgtagaggttatatggaacatga

SEQ ID NO: 195372 - DNA, 1263 bp, Arabidopsis thaliana landsberg
atgcgcaagcagagaaatggtatagatcaagatgagatttgcacctcgatccgtttgatattcaagtctattacgcctattcctaatccaaagaggaacagcgttagaagagtcatttatcaaggtgttgcggatgatgaatttaggctccgttatgggcttggaaacaaaacactagagggcctgcatacttttcccgatcactttgagtgtctcttgtctgtgtaacacttaatttagaatttcttggtggatgccttagcggcggggttttctcaaaatgttatcactcttttatttgaatccttgccaacattttggattagcctttgcgaataatatatatatatatatatatatatcatcacttgcggtctcattagtccctcatacagtatctctgtgaaatcgttataacgataactctcttagacgaagaagaaatcgcgaaacgagaatgtcattctcagacgattgtacatctccatcggaaaagaatcgagctcgtacgagtcaagaaccacgagagcgccctcaagatttgtctttcttgtcatccaaggtaacagagaagcaaattatgagccaagaaccgtttgaaacgtcttgctcctctgtttctccgatgaacagagacaaagaagcctttaacagtcgacatggtccattctcgaaaaaccaaaactacttcgaaagtaatgacatcaccatgaacactgaaaacctgctaaatcctttccatttcggaggaggttcttgtggttgtgcctttttatcaacagagtcgatgttatgttcttttaccgtttcaggtgaagaacatggcacaaacaattctgacatttgggtgaccaagtaacatttctcttcgttgttttgggagcattgaatccatattgaaggtagcaagagatggaatagagattacgatgatgcctatccctagacttgtcaacaacgcacctcaatggaccatcaagaagagactgaccgagcataatgttaaccctacttatggccaacttcgtctgcccagaagcttcttcgaacagcagattcgaggacatctgcctgaagctgatttgcaaaagcggactcattgttaaggtataggacaacgacacgagcacaatgcatgagctgcgtctggcagtacaatatacctatgttctaacgggtgactggctggaagattttatccaaaaggagaagtttgaaagaaagagacgatataggactcttatgggattcttctgcttctag

SEQ ID NO: 195373 - DNA, 161 bp, Arabidopsis thaliana landsberg
tttcttctagcaacatcaaagatttacaagtgctacatggtcatacaccaactgcaacacgcaaggatcaagccccattagatacaaagatgaacatggacgcgaaaaggccacggtataagcggcagctattggatactaacgccattccgatttcgtag

SEQ ID NO: 195374 - DNA, 223 bp, Arabidopsis thaliana landsberg
atggcgcccctagccacagagcagaagaaacttgtgccagatccggtggtcgttacacagtccatcaagcacgtaaagtatcggtatcaacgcgaactaggtatcacgatggatgagatgttagtctattcatattctcatgattttgttctcgctcaggtatctgggctgagaaaaacatcttcgttgtttggtggatcatttatggagttttcatgaaagt

SEQ ID NO: 195375 - DNA, 161 bp, Arabidopsis thaliana landsberg
atggctacaagtgtgtctttctggttttacgctgtgatactctcatgttatgtgagattctccagctcttgcgagaagactcgcggatttgtatcccgagattttgtgtcttctatcaagcagttcttccaatacggaatcccatcagctgcaatgatttg

SEQ ID NO: 195376 - DNA, 178 bp, Arabidopsis thaliana landsberg
atgtcgcgtttgcggtacggcagcacttcgattatggtcggtaccgttttggtggcggcactgtcgggcaaccacaacttggcagccagttttatgccgtcgggcatgggaatccagcagtcttcggtttcggtccagcgatgggggaaatccgcgatggttttcatatttatggccg

SEQ ID NO: 195377 - DNA, 169 bp, Arabidopsis thaliana landsberg
tgtttggtattacggatagggattaacggcctagtgattaactcttttagggctgacgggttgaaacgcagcgggtgcggttatggttgcggaagtttgcagaaactggcggttgcagtttcaagcgttatcaagcgttttgaacgactggttgaacgtttgataatag

SEQ ID NO: 195378 - DNA, 341 bp, Arabidopsis thaliana landsberg
ggatgtacgggacgagttgcggtctcaggattgccccgttctcctgtccgaagcggttcggatcatcaaagacagcagcttctggctagaactcgaggctgcgatcgccgtgctgaaaccggtgaacgactttcaacacgtttctgaggctgatggggcgggaattgcacacgttgtaaatcgctggctgcaaatcaaaagcaaatgggctgaggtgagagaggctgatcagtttcctgatattccgtgggacgatattgacgctatattcaaagctaggcttgataagcaaacgtacgatatacattggatcgccgatgccctccggcctgatacaacag

SEQ ID NO: 195379 - DNA, 351 bp, Arabidopsis thaliana landsberg
atggtgcctgccgataagatcctcgaaaccgcagagaaagaaaatgcagatatcatcggcctcagcgggctgatctccccatcgctggatgagatggtgcatatagccaaaaaaatgcagcgcaggggtatgcaaaagccgctgctcataggtggcgccaccacttggcgtatgcatacggcagtaaaaatagcaccggcacaccaggcaggtgtggtacatgtgctggatgcatcacgaagcgtaaccgttgcaggcgccctgctgaataaggataacaaggcaggattcctgtctgaaacaaaagaagaacacacccggctgaagcagagtttcggcagaaagaagtcg

SEQ ID NO: 195380 - DNA, 354 bp, Arabidopsis thaliana landsberg
agaacggcgatatctgcgaacacggcaactacattcagctaccggcaacggatgtgggaaggatctacccgtgagtgagcttaaggaactagaccgcatcgcggtggaactgtctaaccggctggtcaatgcggcgcgcaactccggcagtgagccggtagtgttcgtgagcgggaactgtatggcacctaactggcgatggttcgacgccatggaacgtcttttttggcagtatgcagacgataccgcgtgctgggtttgggaacatgttgaatctctctgcgagtcgcatgacgtgtacgtggataccgggccggacggatcaatctacgtggtcgataccgggcgattgca

SEQ ID NO: 195381 - DNA, 111 bp, Arabidopsis thaliana landsberg
atgcaagctttgacacaaaatcataggcgccttgcagtccacttgtgcacacatcttcttcgaacccaatggccacttaatcctatcaaaatcatccgcaaattagcaact

SEQ ID NO: 195382 - DNA, 226 bp, Arabidopsis thaliana landsberg
catacttgcatttggagtgtgttccaggtgaatcaagtacttttggactcaacttggacatttctagcacaaggaatggactagctcgagttcgtgggatcaaaggaaggacttggagtatactcgacttttctactcggctggagatcgagtggagcacacaagggagaagcaaggactacactcggccaagacactcggctgaagctcgagtggtgcacatgag

SEQ ID NO: 195383 - DNA, 664 bp, Arabidopsis thaliana landsberg
atggctaaattcccgctcattctctctaactgtctttgtgtccttacgaagctcctcgaagtcatcctccaaactatccattgcttcctgaggaaaaaactttctgttgaactcttccctaaaatcctcccagaaaatcacatgctgcactggtgtgttccccagtacaccatcccaccaatgactcgcctcctctctcagaaaatgaactattatgtctttttggaactccactggacacctagcattctcaaaattattctccaacaacttcctccaatcatctgctttgacgggatcaataccaccagtaaagtattctgtgcccatggtcctcatgaccttcattatctcctagtaagaaatcgcaggccctaccatctgagctgatggtggtggcggtggaagtggtggcctgttgttgctcaggtagaacattttcttgtggttgctgagcacctgcagctgctggtgttgcctgacggattcggtttcattactcttcaacattcctctcatcccttgatctgtcctaacaggatgcattgatggtagcctgatctccgactggaacatcaactactggtggttgagcttatccatcagcgggtgcatcctcaacacggttaaccctttggttcgcaacacgtcctcttttccttaa

SEQ ID NO: 195384 - DNA, 375 bp, Arabidopsis thaliana landsberg
atgtttggcatcgaaggacagctcgaagatccgctaacctctgactggaaactcgtctacaccgatcacgaaaacgatattttactagttggtgatgatccttgggagtacgttccagacctgaaaaatctatctgtaacagtcaagattgaacaattctgataattcttgtctgtttgttttttccacagagagtttgtgaactgcgtgcagaacataaagatactatcatcagtagaagttcagcaaatgagcttagacggagatcttgcagctatcccaaccacaaaccaagcctgcagcgaaacagacagcggaaatgcttggaaagtacactatgaagacacttctgctgcagcttctttcaacagatag

SEQ ID NO: 195385 - DNA, 1470 bp, Arabidopsis thaliana landsberg
  unsure (1)..(1470): unsure at all n locations
ctggcgattcttttggttgtgtttgtatttatgttgggagcgtggtcaggattttggactgtcaagaaatttgttgtgacaaaaaatggttctgttgacattagtacatcaatctttgtctcttggtccatccgagcttttgctgtggctctgatccttcaggtacttcgttttttctctgcttttgcttttgattcatctttgattataaccaaaccttttggtgattgaagtcttgatcttgtgttaattaacagagctctttagatccattacttgctggaggagcgttgataactggaattctcatctcattgattctaaagagtattagcagaaagctgttagctcaaagaatatatgagcaagatgatgaaactgagagttgtagccccggcttgatccatgctacctcgtttgcttctcctcttcctagaggtttcgattttttctctttgtgtctctagtggtctgatttctttatactagtccctttatctcgtaatgttgttcttgaagaaccggtttttcttctgtaaatggtttttgcaggttccaacaagaagttgaggacagtaccattatctgagtcagatatctttccttcttcattccacaaaacaccagaagggagaaggaagctaacgaaggaagagttgcaaaaattcactaaagagagcacggaaaatgcattgaaggaattggtttcttcacctggttttggcgaatgggcggtgaaaaatgctaaaagaatcactgtaaatccgataaaggaatcgtcaagtaaatagggtgatactgttaagcgcagaagaaggttcctctggttctgaaaagcaagcagctaggggaacttctgaaccagtcggagaggtagtaggttgctgtgaacaaagcaacaagccttgcttatatatagtcttctggaaaagaactaatgagcaaggcgaaaaagttgagagattaacttctaaatcaacaaaatgtaacctttgacataaattgatattgaccaagaagatcatacgtttccatgtgtgtagtcatcaatgatgtgaaactcaatactatagtgtattttatttgaatggacgatgatagttggtataataaaggaggaaataaataaagtcatctttttgttatttaacggctgaaatttcaatagcaatttaatttgaatgattccagttccacaaatatgagttggtcatctatatcacatgtaagttttcttagttatatttaaaaatcattaaaatctaagattagtccttggagagaacatgtctcttgtctcctaaacctcctttattatccatcatcattgtcactaaccctattattattccattcacagcgaagaaaaagaagcatagagttcgttataaagaaagaaataaaccctcagataagagcataacagagaagaagaagaagaagatgtcttatcaagacccacaacatctn

SEQ ID NO: 195386 - DNA, 207 bp, Arabidopsis thaliana landsberg
atggcgggagccagtgttgcagccaccaccctcaaaggagatactgtaagtattttttcttatttttcttatgttatttcttatttatgaatgtgcaggctctgcatttactgcaaggagaagtgactacacggatatcattactgcatgatcaagagtctcttggctggaggggccatccgtggagccataaatgcttttggaaag

SEQ ID NO: 195387 - DNA, 228 bp, Arabidopsis thaliana landsberg
gctgctttcttggggccttatcaactctgctgaatgttgcctttgctctgttgacaccgagacaaggaaccatcttctgctgctttgtgatttctcttctcaggtttggaggctggttttcctcaggctctgccctcgtcagcggctgttctgctcatggtaggagcttctctcttggacaaggctttcttcgtcagcagctcctactcacctctccccaagtggtag

SEQ ID NO: 195388 - DNA, 159 bp, Arabidopsis thaliana landsberg
acagcgaatgctataagaaataagaaagccccgaagaggttgatgagagctgagactcctatgtcttgtagagtcgccattgttgataaactcgagagagaaagagaagagagatgggttttgatggagagtggcgtaaaggagaaagaaagagaatga

SEQ ID NO: 195389 - DNA, 579 bp, Arabidopsis thaliana landsberg
ctagaccttggtgtgcttcagctaggtttaacaatgtaccttctcagcctcatcgttgggctcagaaatattatgtcccttatgctaatgatcctactgcaattagaaagctccttcattgggatgcagcttatggtaatatctagtctcgctccacttattacttaggtatttattgcttactgattagtacttttttattttaacagctgatccaggaagttacattggtgactatagagctgattggggttcaatgagcttccttaatgagttcttgagaccgagttactctgaagggccttcttggtttgctctattaaagaaagccgggggtggttgtaatgatctcatgtatagtggtcatatgcttgtagctgtcctaaccgctatggcttggacggtaaaactcttttcacttgtcagctaaatgcattaaagagattttgttatgacgccttaactattctgtggtgaatttatcaacaggaggcttatggaggtttctcttctgcaatgatatggttgttcgtggcacacagcgcacagagagaaatacgagagcgacaccattacacg

SEQ ID NO: 195390 - DNA, 168 bp, Arabidopsis thaliana landsberg
atggcccaagttataacccgaataaaggatccgatcgagaaggagagagacaacagtcacagacacagagagatggcgagagagaagaagacgtgtgtagagtgtgggcacaaggttaaatctttgttcatacaatactctcctggaaattttcgtctcatgaaatgc

SEQ ID NO: 195391 - DNA, 434 bp, Arabidopsis thaliana landsberg
atgccactgcgtggacggtgagtaatttagttgtagatactgacgagtgcgactggcttcgcctgggctttccattgtctatagaatcgtggaacgagcctccgagcgggatgcggaaacttattgcggctgcgcagacatcgagtcagttacgtagtcgcctctagccttccacagcacattattcaagtcatgagataacttcgataaaatccgctccagccacctgttgacagtgtcagagccggcttccatggccctgaccaaccataccgcgggtattgtctgccactggggcccgccacgcaagccgaatcgtcagcgtccacaaaagcttttaggtggagacgttgatggatcgatgtcagtcttcaactcggtgcacttgacagcccggcgaatcggagtccgacctaattactctacatacaaac

SEQ ID NO: 195392 - DNA, 374 bp, Arabidopsis thaliana landsberg
atggccgttatcggcatcgaaaactggagtgcaaaagcaagattcccaaaatacggtgatctgaaaaaagcttatgccggaacagaacagatcccttttaagattttactttctcatgatccctcccattgggatgcgcaggtgaggccggattatcctgatattgatctgatgctggcaggccatacgcatggcatgcaattcggcattgaaatacccggtttcaaatggagccctattcagtatgcttataaagaatgggcagggttataccggaagggaaaacaatatttgtatgtaaaccggggttatggatttttgggttacccgggaagagtgggaatattaccggagatcacggtgatagaattggt

SEQ ID NO: 195393 - DNA, 133 bp, Arabidopsis thaliana landsberg
tagccatgatggaaccattaaaagtgtttataagcaagcttacgagaattgcacctacgatcctgttacatcgcctcgcaaaattcatgagattagagtgttttcaagaagactcgatcccaatatcagacaa

SEQ ID NO: 195394 - DNA, 143 bp, Arabidopsis thaliana landsberg
atgtcactaagtggcgtgcagatggaagtccttcgactttttaggagtttcttaaaggaagttcgctcccggccgccggaatctcgacctcaatttctggaggtactttatgctcgcttccgccaggactccaagatcccaaa

SEQ ID NO: 195395 - DNA, 402 bp, Arabidopsis thaliana landsberg
aacaaaaaggcttaccccactggcgatgacgacaccggggacgacagggacgagagcaccataagtaacccaagcttctctcttaaaggtcataagataagcaaacagagccgtgaaaaacggcgtcgtagcaccgaccgcttgattgaaagagacaggaaggtaacgaagggagatgttaccaccgacgacggaagcacaaaagacgatgctgagagtagcaaccttaaggaattgagaacgagatttgagatgttggagaggaacaagcttgaggaaaacaatggagatgtagctaaggatagcgcaagcggacatgtgacacattgtgagaaaaatcgggaatttgaatccgtaattcgagagaaggaacttgttgaggagaagaacaccgatgtttga

SEQ ID NO: 195396 - DNA, 131 bp, Arabidopsis thaliana landsberg
tctacttcaaagacctttgggctttggacaggaactgccaccgttggagcaaccggaatcctcgggttgactttgcttgggacgttggctttcgttctatatgtgacactcaaagacaaaaatcacactga

SEQ ID NO: 195397 - DNA, 259 bp, Arabidopsis thaliana landsberg
atgggaatggaggaagaaggctctactaaaaacatgaagacaaaggttcttgaacttccaacaaagatcaagaagattctaaagaatatatggaaagttggaaaagatgatccaaggagagtgaaacatgctttgaaagtaggagtttcgttaacacttgtgtctttattgtatctcatggagcctctcttcaaaggcattggaaacagtgctatttgggcagtcatgaccgttgttgtcgtcctagagttctctgccg

SEQ ID NO: 195398 - DNA, 862 bp, Arabidopsis thaliana landsberg
gatgactacaagcgatcaacttcaggccaggtacaaccaacaaaatctgagagcaacaatcttccaattacctttggctccgagaaaggttcgaactcctccagtgacttgcatttcacagagcatattgctggaactagttgtaagaccacaagactagttgcaactaaggctgatctggagcggctggctcagaacagaggagatgcaatgcagcgttacaaggaaaagaggaagacacggaggtaaatgctgcttttttctttcccctttaataattttttattgcccatctcccttaaagaatctgataccatatttcgtttctccctttgtcttggatctcgggtgccaacagatatgataagaccataaggtatgaatcgaggaaggcaagagctgacactaggttgcgtgtcagaggcagatttgtgaaagctagtgaagctccttacccttaaccttaagtctcttcacataggcttccttttagctacaaacttagttactttttttacttccactgcctcataaatgtacagaccggtctcgtttcatctggccgcccttctgttttattgccttatctggcccttttatgtaccttggaatcttatctagtttaaaaaagattgtaaccttctagaaaaccatattctgttgacagtatatacatgtctatccaagcattttgaagtctcacaagctaatacgccttgatactctttgttttaaaaaccctgacttatggctgttaatcaaagttttccaagtccagttcgcagatggcgagcggatctgcggctgtggttcttcgttgctgtttctttggtggttctggctgtgttggccaattcagaag

SEQ ID NO: 195399 - DNA, 147 bp, Arabidopsis thaliana landsberg
caaaatcaaccgcctcaaagcttctgataatcatgctaatcctatatctaggcgtttcaacaacctgacacttgatgagtttcttgatagtcccggtcatgcatctctaacgagactagaccctaatcgtcctccgggaactctctg

SEQ ID NO: 195400 - DNA, 123 bp, Arabidopsis thaliana landsberg
gtgtggaagatgatggttttggaaacttttggtgcaaacaggggagcaaatcttattgctaaaagtgtgacaggagatctgagactgcagtcgtatgtggcaatgggtcctccaagctgcctg

SEQ ID NO: 195401 - DNA, 239 bp, Arabidopsis thaliana landsberg
ttgtggcgatgggagtacgggacttgggcagttgggctggctgtggtccgtgaagtggttccaaactccagtgaccccacaagtcaggttcctttaatagatatttgggtattcggatatggatactgattttttgtacccgttaaaaaaatatccacggatatcaaatgctacccgtatccgtatccacgggtacaggctcgtacccaaaatcgtgcccaacaggtttttatccacgg

SEQ ID NO: 195402 - DNA, 275 bp, Arabidopsis thaliana landsberg
atggttagagctaactactattcatggatgttcacagatcctgcaaagaaaggtcagttgtactggacacagcgataccatatcattggtgggattgctagagggatcctatatcttcatcaagattcacggctcacaatcatacaccgtgacctcaaagcgagtaacattctcctggatgctgatatgaatcctaaaattgctgattttggaatggcaaggatctttggaatggatcaaacccagcagaacacaagcagaatagttggtaccta

SEQ ID NO: 195403 - DNA, 193 bp, Arabidopsis thaliana landsberg
attggtatcgagagaaggttttgttcatccgattacgagaaaaccacacaaaaaatcaaaaggtaacaaactgatttcactcttcatatctttggttagtttcatttttcgtattcctcagaaatttgatttttgttcggtggtcgtgtgtttctcccattgggttacgagaacaaggcactctgagttttga

SEQ ID NO: 195404 - DNA, 173 bp, Arabidopsis thaliana landsberg
aaagcttacggttcagtctagcaagcgctccagctgcatatcggaagacgcatctcacagctcgatacgacagattcagctgcaatgagcataaaatccggatacattaccctatggagtcacgcaaagggaaggaaatcaaatatcctattaaagctaagatatatcagtga

SEQ ID NO: 195405 - DNA, 1186 bp, Arabidopsis thaliana landsberg
aaaatcgagatcctctccgttctctctccttcgtcgtcgtgttcttcttctttcgtcgccgttcatctttttcgtcggccaccatcgattccggccgccgccgacttgaaatctgtcgttaaaggcaacgaattaggtcagtttcttctcatatttcctttgacattggtgcattgtgattttagattgggattttgaattatatataattcccagattcaatttgatagtttgatgattggtttgcaaagtaaagagtaatcgattagaggttgccgaaacgttatttgaggtgatgagcaaaggaatgtaggttgaatgtgagttgaatttgaattccgagatttcatattaaagatttggggggtttgtgtttgcaaagtttagattaaccaattagtttaacgaataggtatgtattaacattggaaatcaattgaaaggtaacgaattaggttcagtataatcgagtgcgacgagagattgatttcaacgtatgataagagtccatgtggtataactattaaaatgtttgattggagttgaactggttgtattttcaggagcgatgaagaagaagatccacactaaggtacattttgactttggaggatactattctgaagtgaatgagtggattggtaaaaattcactatatgctatatcgtttaagacgagtagtttggagaagattagctattcgatgttagttgacaagatcatgaagaaggttgcgattgatgaagcttctgtcaagttgaaactgagttacaatctgtctaaagttaggagagagacatatattgtagatgatgaggatgtcttcatatttttaacagaatctggtgaagagagtcggattcctgttttgcatgtggaggaattaaatggtataggagttgagaggagagtggaaatttctgtaccggagcgtcgaagttcagttggtgtaaatgtaagagaggatgatgttttaaatgaagtatgtgagatggtgcatgatggatatgataatgatgtgaatgattgtgagaatgtagtaggtacggagatcgtggctgtcgaaaggccgatagaaaggccggtgaattctgttgaggaagaagatgaggatgttaggattgattatgatgatattcacgatattccacgaagtgtagaagttactccgcaggttatagaatga

SEQ ID NO: 195406 - DNA, 268 bp, Arabidopsis thaliana landsberg
gccatgcgtgtagcccaaggcgaaggcgaagaagcgcttgcggccgacatcgacatcggacagcggcacgagatcgggacacaggaaaccgttacagcccgtcgcgcggtacgctctcaagcacgcgggcatgttcagcacgccctcatcggggaaggcctctcggaaaaacaaagtagcccccggtgatgttgccgaagggcaccatgaagatccgcttgcgtgcccccgaagattggggatcggtctccagcacggtggtgttcgg

SEQ ID NO: 195407 - DNA, 343 bp, Arabidopsis thaliana landsberg
atgctcgacaaggagtgggtgcacctctgcaggttagttgtttttatataggttagtttcattagaaaattatgagatttgcatgttttttgaattccctttttaactctttaataaagagttgatcctgcttatgagagaggagctacaaaatttttccggactgtggctgcggcaatgggagacgttgatatgattaattgtccttgtattgattgccgaaatataaatcgtcactcaggcagtgttgtagttgctcatctggtgacaaggggaatggacgaggcttataagatgcggtctgattggtatcatcatggagaattgataccaatggctgaag

SEQ ID NO: 195408 - DNA, 229 bp, Arabidopsis thaliana landsberg
aggcccgccggagacgagggtgtgggcacgctggggcccacgggacgccgggaagggctcagggagattcgggggggatgtagcgaacacggtcatgagcacagcaacggcacagagacgccggaggacaactgtccgcggcgggatggctcgacggcagagcaactacactccggcgagcaatctcgcccagccgagaacagaaaaaggataaattggggcgagaaag

SEQ ID NO: 195409 - DNA, 156 bp, Arabidopsis thaliana landsberg
cttattctacgtacggcacacagaaaggcctttttcttaaacgagatttttccaaaacaattaaccgtagatatgaaagtaaaagaatccaacttgtccaacttatttaaacgccagtttgatggtttattgtggctctctcgacgatttgattag

SEQ ID NO: 195410 - DNA, 241 bp, Arabidopsis thaliana landsberg
ccctaaagtgaaagagaaagaaacacgcttaccggaaaattaccagcccggttatcaatccggttatcagcccggttttacgccgggatatcaatatcaaccgggttactcggctgggtatcagtatccggttgaaggatggggattcatgggagagaatccgaatttaaacccgtacccgaatccgaaccagaatccgggaatgtactttatgaagaagtctgtgcaaccgtcacgaccg

SEQ ID NO: 195411 - DNA, 149 bp, Arabidopsis thaliana landsberg
tgtcgagtccttgggatgatctcatcagaagccaacccgattcaaatcctatttggcgacgaggggaacgatgttcttcagcccaaatcaaagcggaagaagagaaaatggaagaacaaagtttaaatgtgtttcaacagacaaaataa

SEQ ID NO: 195412 - DNA, 332 bp, Arabidopsis thaliana landsberg
tcttccaaaagacgcaattattgggcaataagaacctagcggcgatgaaaggctcagtgaataccacgactgatccgacgctcaagatcccatttgagacttgcgtgagagattatgaaggagccattaaagcgatcgaggaagctcaagggtttgtgacctctaaggcgtacccgttagcatctcaaggggctgctaaagccttcattagtatatcagtgtgtgaagctcagtttgcaggaaatgtgccggcttatgtagcaaaactcaatttgttttttaagagaatgtgtaatattgatagggttttctccgacgttttgacttcttga

SEQ ID NO: 195413 - DNA, 310 bp, Arabidopsis thaliana landsberg
atgcttgttactgttcctggaggagctgatggcccgagtggagttttggtttgcgccgagaattttgttatttacatgaatcagggtcatccagacgtgagggctgtgattcctagacgaactgatttgcctgctgaacggggagttttggttgtttctgccgccgtgcacaagcagaagacaatgttcttctttttaatccagactgagtatggcgacgtttttaaggtcaccttggatcacaatggcgatcatgtctccgagttgaaggttaaatacttcgacaccattcccgtcgcatcgtctatat

SEQ ID NO: 195414 - DNA, 155 bp, Arabidopsis thaliana landsberg
gattagatcctctgcggccgagactaggattaaggcacacgcgtgacgggttgatgaacgaatctcgaccgtcgattctgggtctcagagacaccagagacgaagacgcgtgcaggagtgactccattggagaaagcacgagtgaagtgaagtaa

SEQ ID NO: 195415 - DNA, 191 bp, Arabidopsis thaliana landsberg
tttgcaactaccatgaccccaactggtgctgcaactattgctcctatggccatcatcgttctgcctacaccatgtcgattagtcgagtgctcactcccttccaccatcgctacccaacatccacatcggggggaatgtgggtccctatccacacggttccgtttgatgagctctccccaggctcggagtaa

SEQ ID NO: 195416 - DNA, 119 bp, Arabidopsis thaliana landsberg
aaaccttcaaaaattcgaccataccaacactgatatccaaaggaaaaacaaagaatgtaaccttcaaaatgcaaaaagaaaagataattaaaaaaggaaataacttaaaaacgaaatga

SEQ ID NO: 195417 - DNA, 164 bp, Arabidopsis thaliana landsberg
ccattggtggttgtgtaggatgcttctacatgggtcaaaatcaagggatatctaaagctggcggtggccggacaatgccaaccgcttacccggctgcaccacaagccaatcaaggttacaatgctggagctcaacattaccctcctacggcgtatgctgtctaa

SEQ ID NO: 195418 - DNA, 3318 bp, Arabidopsis thaliana landsberg
cagctgccaccgaataaaccttcgacgacggtttcctaaccatggctttgacgattcttcaatggaagagaaaaataaagaacatgttgttgcacgtcaaattactaggtgaagaacagaagacgatagaatgcaatcaaaattagtgtgtcagtacatatatcttatatcaagaagacgtttctcttacaaagtagtattttggttgtctacacgactttttgctattaaaaaacacattcattattgtataaagaatcttgaagtaagaaacgcttatgcatggaatactactacgaataaaacatttaataacatcctaacaataaacatttaatagctgtaaacaaacactccaattgagatatattattgttaatttaatgttcaatcatttttgggtcaacatccattgattaatcaaatgagagattggtgaaatattgtttacatacataatattgtcggttcgttctatgagagcttataagaggttcataaaatcgtattctagtgatgcgggtggagttcttggtcgtgttcttcgccgttaacggctcaatgtttttggtttatcggtgaaagacttttatctcactggtaagccaataacattgagccgtttgacagaattatcttgtttaattaattctatacataattaattctataaaaaactataaaaaaactatatcctcacttgaattttcattgtttcgactttcgatattttgccgtttgacagaattatctttctcttctaggtgtcttatatgcaatcaaaattattgtaccttcattgattttaaaacctaactgttttttttttttatgtagatggaccaaataatatttaactttcatgtttttattcttttttaccatgggaccaaactataaattttatattcttgtaactcttaactttttcattttctaatcaaatattaacatttttagcaaaaaaaagagaccattttcacagtactatgtaaaaaatgatacgtcgtcttactatcgacgcttatcatgtaagaaatgtaacttcttaattctatgttctatctaattacaaatataacagttaattaataattgatttcaattgacaattggagttatttactctttttttttgttgttttgacatattataatttatctaatattaaatagtgaaagagacaaaaccagaaaaacaaacaaaagatatagttttttatagaattgatttttgttatgccatgatttttttctccagctcaacatgattaaactataaaatcttgattacgatttacgatatttttggagatcaaatttgtgatttttttgttataattatgaacacattaacgggctttagatctttataagcccatttaaggcccatgaatatttttcgttacaaaacgctgagaccaataatcgggcgggaaagccacgccgccggtaagttgtgaacggcgaagaagatcaatgctacgctcaatcactctttctccgactagaagattcgggtttccgcagagatgcgtctcgtttacgacaatcaaagaattgattttaactgaagagaatgatgggtcttctctgcattacgccgcttcgagcccgtgctttctccttctaagtaagtgcacgaacattgattctctaaggcaatctcacggagttttaacgggaaatggactcatgggtgatatctcaattgccaccaagctcgttagtctatatggttcctttgggtatactaaagatgcacgtttggtgttcgatcaaattcctgaaccagatttttatttatggaaagtcatgctcagatgttattgcttgaataaagagagtgtagaagtcataaagttttatgatttattgatgaagcatggattcagatatgatgatattgttttctcgaaagctttgaaagcgtgtactgagcttcaggatttagacaatgggaagaagatacattgccagctcgttaaggtgccgagtttcgataatgttgtgttgacaggtcttctagatatgtatgctaaatgtggagaaatcaagagtgctcataaggtgtttaacgatattactttgaggaatgtggtttgttggacttcgatgattgctgggtatgttaaaaacgacttgtgcgaagaagggttggttctgtttaatcggatgagggaagacaatgttttgggtaatgaatatacttacggtactctaataatggcttgtacaaagcttagtgctttacatcaaggaaagtggtttcatggttgtttggttaagatcggtatagagctcagctcatgtttggtgacatctcttctcgatatgtatgttaagtgtggtgacataagcaatgcacgtcgggtgtttaatgagcattctcatgtggatcttgtcatgtggacagctatgattgtggggtatacccatcacggaagtgtgaatgaggcgctgagcttgtttcagaaaatgaagggggttgaaatcaagcctaattgtgttaccattgcaagtgtcttatcgggttgtggtctgattgaggatcttgaactgggaagatcagttcatggcctctccatcaaagttggtatttgggatacaaatgttgcaaatgctctggttcacatgtacgccaagtgttaccagaatagagatgctaaatatgtgtttgaaatggagtcagagaaagatatagttgcttggaattctataatttccgggttttcacaaaacggctctatccatgaagctttgtttcttttccatcgcatgaattcagaatctgtgacgcctaatggtgtaacagttgcgagtcttttttcagcctgtgcttcccttgggactctagctgtaggttcatcacttcatgcttattccgtgaaattgggtttcctggcatcatccagtgttcatgttggtactgcacttctggacttctatgccaaatgtggggatgcccaatctgcccgtctcatcttcgatactatagaggagaaaaacacaatcacatggagtgctatgatcggaggctatggaaagcaaggggatacaatagggtcccttgagctatttgaggagatgctgaaaaagcaacaaaaacccaacgaatcaaccttcacatctattttatcagcttgtggccacacagggatggttaatgaagggaagaagtacttcagctcaatgtacaaagattataacttcacgccttcaacaaaacactacacatgtatggttgatatgttagctcgagcaggtgagcttgagcaagccttagatatcatcgaaaagatgccaatccaaccagac

SEQ ID NO: 195419 - DNA, 224 bp, Arabidopsis thaliana landsberg
atggaccagcgcctggatgccatgcaatctagttttgataataactgggatgcgctaaacattgagtattctgaatttggcagtcacattcaaaatcatgtcactgatcctaccatgaacagattcaacaacatgcagcagagttttcaggacaacatgggagctctgtctagtcaatttgacaatctctctaccaatggcagcatgcaagagatcagtcagag

SEQ ID NO: 195420 - DNA, 236 bp, Arabidopsis thaliana landsberg
cttactcggccccatccctctcaccaacacttcacaagcaaccaagaaatccccatcactcccccacgcttataactccaccgctcgacctcatcgttttctcctccataacccctcttcactcgacctcatcctcgtccaaactcaaccatactttcatttctacatactctcattcactcgacctcaccatctctcttcctcacaagcactcgacttcaacgccggaagcttaa

SEQ ID NO: 195421 - DNA, 64 bp, Arabidopsis thaliana landsberg
atgaatgtcaacgaagttcttcatctggtgatcgagcacaacgatatgttttcctttcccatgt

SEQ ID NO: 195422 - DNA, 674 bp, Arabidopsis thaliana landsberg
acaccatcaccgtgcaagccccacaaccaccttcgccgcatcccagctttgtaccggtcaatcctaaatctacaagaaacatctgtaagttagaaactacttcatgatcgtttagaaaaaaagattgatctctgcaagtcattttttgtccccaagcgaatctagcaattggagcataatcttactcaaataaagacagtggtctaaaaaaacaaaagaacagtggatcaaacataatctcgatttttttagaatccagaatctataagtcaaacataagcctttttctttaacatactagagtaagaaactaggaatccaaaaaacagaatcttcatagagagtatcagttcaaaattgaattgaaaattaaacttgtttgagtacttgaaatcatccccagcaattggatattaatcaaagaagttgatacgcacctctgagatattcgagaagtgtcatatgagccaatccatcaggcaagactctacgaacgccgttaacgtacagtaacgcctccgtaaactcatctccgatctcgccgtcctttttcagtgaacccatttctcaaattgagagaaaactcgattgggatcgaaacaaaaacgaagatggcgaagttgattacgccaagtcaagagaagcaaaaaaggaataacattttccttttttaa

SEQ ID NO: 195423 - DNA, 581 bp, Arabidopsis thaliana landsberg
tttgtttgagatatagtacaaacatagtcaaccctcattttgtatcaacatcaagttctcaagatgggtttgagagacaggaacatgattatgtagatgatcatgactttatgaatgtgggggttgaaggtttagcttctgtttacgacaagatggtaaatgaagaggggtttgatgcaaccaagactaagcttgatgtgtacttgaaagaaagtgttgaaaacacaagggccaatacattgggaacaaaatatgatgtgttatcatactggaagctcaatagtcttaagtttccgattttatctgtactagctagagaaattctagctttgcaagtttcttctgcagcttctgagtattgttttagcactagtggtcggatcgtagagccaaagagaagtttcttaacacattatataattgaggtcttgatgtgtacagaacaatggatgaaggctgactattatattagtgaaaaagttgtggaaaactatgcaaagatggttgaggatattgaagattctgatgatctggagaaaggtataagtgttggcacttgtccgtttcttactttcttttga

SEQ ID NO: 195424 - DNA, 114 bp, Arabidopsis thaliana landsberg
agagactcaggcgttgaggagacgcgcacgcgtggtttcggacaccaaactcgctctaaaagtcactcacgtggagcggttagaagagtcacgtttcgaaacgcagacgcagag

SEQ ID NO: 195425 - DNA, 147 bp, Arabidopsis thaliana landsberg
gaggtaaataagatggatgagcatcactcttgctatggggccttagggagcaccggctgcgcgcgtcaacgcccaagatgtgatgaaccgaacttgaccctgaaccgggggtttactggctatcaagaatggggaaaaggaccctga

SEQ ID NO: 195426 - DNA, 140 bp, Arabidopsis thaliana landsberg
atgccgcccagctgtccgcgcttctgtccggcatggattggacgcggatgcacgcgcctcggatcccgcagccgaaagcgcttgcgtaaagatacagatcttcgctgcatcggagcacaaagcatggcagactcgggccc

SEQ ID NO: 195427 - DNA, 221 bp, Arabidopsis thaliana landsberg
aaaacaaagagaatggtgaggtaaacggtgtgcattcttttcgtgaatactcactagaacagcttaagatcgccacctcttgttttgctttggagaatgttgtatctgaacatggagaaacagctccaaatgttgtctatcaagggaaattggagaatcatatgaagattgctatcaagcgcttttctggaactgcctggcctgatcctcgccaattcctg

SEQ ID NO: 195428 - DNA, 424 bp, Arabidopsis thaliana landsberg
aggcttaacattgatgattctagtttctccacgagtttaagtagtgttttgaagcacaacggcgatgatcatcataatcataatcgtaatgatgattatggttttgatgatcatggtttgttgaagaagagaaatggtagtgacagtaatactactactagaagtaaaacaaataatgacaagagttataatggtggcttcatgaaaaaggtgagcaagagaagtttatggaagggaatgattgtgatgggtccagggtcgacggtttgtgggagaagtgatgacgtggcttcgcaggccggaaggagaacggttaaggttgcggtggctgcagaggctctggtcaggtcgtcggcaagtgggagtggcaagactcaaagtggtcattgctaactttagtggttcttgggttgttgaactttga

SEQ ID NO: 195429 - DNA, 197 bp, Arabidopsis thaliana landsberg
atgactctttctaatctaaggcgctcacccccgattggacggctcgtgttcctcttccacctcacgccgttagtgcacagtacgcgctgcaccccgcagtggagctttgtcgtcatgaagcgcacccagcaccctggtggactactgctacccccagctacgcaataagggatgtggagaacatggtagataggttt

SEQ ID NO: 195430 - DNA, 193 bp, Arabidopsis thaliana landsberg
atgatgatgatgatatctgcaggcggtgtaactgcagaggaagtgtatctggacttgcgagaaacactggaggatccacagtttctcggatttgtcagagacatgggaagagcttatgcgatgattctcatggaggcagaggatcaccctctttcttcgaaagaattattacaaaagctcagtggtcttgcag

SEQ ID NO: 195431 - DNA, 217 bp, Arabidopsis thaliana landsberg
atatacttgcccaaaaggttatcttttgcagcaaccatgatcttagcagtggtaccaccagctataatactgagaggataccaaagatacacctgttcacgtcacaagaaacactttttacaacaaaaagtaaaatgctgaaaagaacactcgcattgatgaaaccagaacacaattgcaatctgataattgatctaaaggatcgaattgaaagaaa

SEQ ID NO: 195432 - DNA, 57 bp, Arabidopsis thaliana landsberg
cacttcttcgagttcaccaattcgtcgcctgaaacctttctctgccaatttgactaa

SEQ ID NO: 195433 - DNA, 342 bp, Arabidopsis thaliana landsberg
gggaaacacacacgcaaaacaaacgacacatccggtaatgcaaggcgtttccgaaaactgttttgtatggcatttgttgtactaaccacattggccggcgaagtgttgcatgcacaaaatgtatccgtagcgggtaccgtttctgctgccaccctgagcggtaccctcagttcgggaacgctgtcatgtattaccagtgtaggcacgctttcttcactcaccgtaaccaacacggcctttgccaatacattcagcgctgttactttaaccggcactgtaaataccgttgcacagcccaatatcacatcgataggaacacttacaggatttgatgtgaactga

SEQ ID NO: 195434 - DNA, 291 bp, Arabidopsis thaliana landsberg
tgtcagaatcatactatttgttgtgtgtgaagcttgagaaattgtgtccatcagtggataccgaaagaatacggaaaatatacaacaaagctgttattgatcaaggaaaagaatcagaaggtaattactagttgctgacgatctgacgacttgaagacatttggatcgactttttgaaatgggaaacagaacaaggtaaccacagcaaagcacaccaactgttctggaatgccaaacacacctttgccaatccttcagcattcatagcacgctaccctatgatgaacaatg

SEQ ID NO: 195435 - DNA, 389 bp, Arabidopsis thaliana landsberg
cccgaccgtgcaggtcgaccggaacgcgcgccaacctcgtcaccagcctgctgcagggcgaacgtctggttccgccaccgccgctgccgccggcggtgttcatcaccagggaagtcgaacgcgaagccccgcacctgcacctaggcagtgccaatcgcaactgggcattgttgaacccgcgattccgccagcggctgctggccgtattcaagatcatgcgggatcgctacggctaccggatggcactgatcgagggctaccgcagccccgggcgccaggcgcaattggccgccgagggcaccgacgtcacgcgtgccggcgccgggcaaagctatcaccagtacgggctggccgcggactgcgcgttctatcgcaacggccagctggtg

SEQ ID NO: 195436 - DNA, 72 bp, Arabidopsis thaliana landsberg
cgtttttggttcatctaatcaacgaagtgaactttcgaaatcgatatctgaattttgatttaaaaatgggag

SEQ ID NO: 195437 - DNA, 215 bp, Arabidopsis thaliana landsberg
cagtagaagtggaggcacaacgattggttcctctttgtaaaacaattggttatgaaaatcctggaaaatgtcctgctgacggaaacaagttttgtcgccgcaaattggatgatcgttatgtaaaatataagcgttgcgattgtcaagataccaaagggcgaaagcaaacccaccatcgctgcatatgttatatgaaacttccttgcaatcaatag

SEQ ID NO: 195438 - DNA, 87 bp, Arabidopsis thaliana landsberg
ccggttaccgtgacggcatccccgccccgaaagctgagcacgtccagaatgaattcgaagccggattccccgtcggggcacagctgg

SEQ ID NO: 195439 - DNA, 608 bp, Arabidopsis thaliana landsberg
gtagcggggaagcgtgttcgaacggatgactcttcgtccaagaagaagaagtacaaaaggaagaagccctcgagcgacgaggcggagaaggagctcccgatctttaaggatcggattacctcggcaaaccttctcgagggctgtgcgggtcctctgctccctccaccggatactctcttagagtcgcggaagtatgccgagacggcgtctcacttcttgcgggtacgtgtaacccttttccttctcgtttgcgcgttatttctaagttctgatctcgtaattagtctctaatctgctctccaggctgtcgcctcgatgaaccggatggcgctgatatgatcagggatagcattaacgatatggagcatgaaccggagcttgaacgtgagcttgtagctgaggatgagcttgtagctgaggagaagcttgtagcggaggatgttcttgtcacatcggccgtcccaatgacttgttctagagctaagctattcgaccaagccattgccgggatgcttaaccacatttgggaccgaccaaatgacttgagccaagtcactacctctttggttttgattcaagctcaaggacctcatcaagaggataagtga

SEQ ID NO: 195440 - DNA, 93 bp, Arabidopsis thaliana landsberg
atgtttagatctagcaactctgacaaagcggagtccacaaggtgggaagttggcttcattagagatgttagacgccatgatttcatcacacac

SEQ ID NO: 195441 - DNA, 92 bp, Arabidopsis thaliana landsberg
gatcgctgatctatcgtgaccgtgaaatttatgacccatatacatcgccgtactgtactaacgtcatgtcgaaagaggtctctcgtgtttga

SEQ ID NO: 195442 - DNA, 527 bp, Arabidopsis thaliana landsberg
tttggttggcgatttacttagttgttgtgccttgcatagtacttgtaggtctttcgggattacacaagttcctgacacgaaagttttggaacaagagagaaaatcctcgttctccattgattgtcaacgacttgaagctctggaaactcgaatcgccaaacctagatgagttagaggaagagtttgactcgttcccgtcgtcggtgagcgatgtgaacattctgcggatgaggtacgatagaataaggatggtttgtcagagaccgatgatattactgggcgatgctgcgtcacaaggtgaaaggctttacgctctcttaacgtttaatggcgatgatcaattggcttcgttttactgctggctcatatgtgttttggtcgcgctctgctggtacaatataccgatgtggctttggtctctctaccctatcgcatattggcttaatttcacgcccttacgcaacgatatgccctgtggagtcagcaacttcttccgaagattgcccacaaacgaagtattgctctga

SEQ ID NO: 195443 - DNA, 198 bp, Arabidopsis thaliana landsberg
atgggattaatggatacaagatgggaaaccatagttccatttattgttatggcgttgatggaggcatgtaccattgcactcaccatcttggctaagaccgcactgaccggtggcatgagccctttcgtgttcatcgtctacaccaacgctcttggctctctccttgtcctcccttactctttcggctacaatagacat

SEQ ID NO: 195444 - DNA, 893 bp, Arabidopsis thaliana landsberg
agatcgacggcaacaacgtcgacagtcacgaggaatccaccacgaacgaagaaggtttcgttcttaagaaacaagatccgaaaacagtctccggccagagagacggttcgacggagaacgggtcgggtaacgatgtggagtcgggtcgaccaagtgtatcgtctacgacgtcgtcttcgagttatatcaagaataagagctattcgagcgtacgtgcctctcacgtgttacggaacttgatgaagtgtggtggtttggacacaaacgacgccgtattggtgcctttgaataagtctaggtctggggcttttggtccggcttgggaagatgaacgcagataccaataccaccaacagcacaatgctcggtacgctccaaagtagccattactcatatttttattcaattaatcaaatattaaaattagttactttatcactgttaatgctatatatgattgggactaatcttatgctatatcatataatattaatattattatctttatacgactataccttatagtacttgaattcaaattggtaaaaacgagattttctcattttgtttggtttatattatagaaaaagcttcgaaggagcatggagtggcataaagatgaaagagacaattgagttttgtaaaccaaaggttgctccaagcaagccttccatggctccattatgctcgtaagctctgctttatatcactcattatgttcataacttaaatttatattgtgacgtttataattcataatataggcaatgtgggaagttgttcaaacctgagaagatgcattcacacatgaaattatgtcgagggatgaagaattcatcggcgaataatgatttgatgacaagcaataataccgttaaaccgaggcagcaacg

SEQ ID NO: 195445 - DNA, 404 bp, Arabidopsis thaliana landsberg
aaaatgatgaacttacgtcttacaaggaagcaatgatgggccccgacttcgataagtggttagaggccgctaaatccaaaatggactccatgtcacaaaacaaagtatggactttggttgatttacctaatggtgtaaaagccattgagtgtaaatgggttttcaagaagaaaattgacatgcatgataatatacatatatacaaagctagactggttgctaaaggttataatattcattgtattgactatgatgaaacctattctctagttgcaatgtttaaatctattcggattctcctagctattgccgcttattatgattatgagatttggcaaatagatgcgaaaacagctctccttaatggaaacatggaagaggatgtgtacatgaaacaaccttaa

SEQ ID NO: 195446 - DNA, 554 bp, Arabidopsis thaliana landsberg
gaaacaattcctctctttcacagcttttggcatttgtaagttcagttaggttacttttgtgatttgatgaggtgccgtaaaaaaatttctacttaagtttatgtttacaaaacattgtagctgctccagttagttaggctgggtttagacgactaaatatttcccgtctatggaaatatcaacaggtttttagtgaagtagtgggataatagcttgcttgagcaacatgaataggaaccatcatcaaacatatcaaattttgcgtaacaatcttgcatcatataccaagtatttccctggagtcaaagttaatctcaatcgtgcggttgaatgtgttttgtttttgggtgttgcagtcgaaaaacgtaaactacgctatggaagcatcaagaaaagcgcagattgcattagcagctgcaaagggaaaatcgtttgaaacgagatacagtagtaatggtataacatgcatcaaaagggctcttgacttcaattttcaggacatggagaaactgttgcatgtggtgaggcttgcaatggaatccataaaccggtga

SEQ ID NO: 195447 - DNA, 180 bp, Arabidopsis thaliana landsberg
atgttccatattcaaatagcggagattcacgaagaagtattgcgctatttacgagtgagtgggattattggactgatcttttggtgggaaatgtttttcattttagataatgaaagcattccattactaccaacacaaagaaatacgacctctcttagatataaggtttatgccggaaag

SEQ ID NO: 195448 - DNA, 443 bp, Arabidopsis thaliana landsberg
agcttacacatttagatctgagtgggaaccaactaacgggcaccgttccaagattcatctccaaaatgaagtatctcacacacttgaatctagctaacaatgccttccatggagttctaccattcaatgcgagctttatcgagaatctcgaagtgttcaaaattggtggaaacagtgatctttgttacaaccatagtgtattgtcatcgaagatgaaattgggtattgctcagtgtgataaacatggtttgcctttgtctccaccgccgcagaaagaagattcgaattcagattatgattacggaaatgaagatgatactagtgagaagaagaaagaagagcatcatggtcctaataaagttgtgcttggtgttgctattggactttcttcacttgtgttcttaatcatcttcatgatccttctcgccaaatggtgtggttga

SEQ ID NO: 195449 - DNA, 216 bp, Arabidopsis thaliana landsberg
tttaagtcgattcttcctgaccggagtacaaaagttgacatttcgctagctggtccatttgctggagctgcactctcagtttccatgtttgctgttggtctgttcctatctacagaaccagatgcagctaacgacctggtccaggttcccagcatgttatttcaaggttcattacttcttggactcatcagcagagcaactctgggatatgcgtaa

SEQ ID NO: 195450 - DNA, 346 bp, Arabidopsis thaliana landsberg
gtcacacggagaacggcactcgaccccaccacatgggcaggtctaaaaggcaccacgtggcaagaaaaggtaatacatcccaggaagcgccgttgggtccggacctccgcaaaggaacaccggacccttgtgagtacgagtccggagctcccgaggaggcatgctgggcccccccgaatgaggtccgggccttagcaaggtcccgggacggagaggaccccggcacaagcaagggtccggtgccgacacgtgtccagtccttgccctacgctccccgcccaggcgaaaacccgccgcggccgcgtggcttgtggctcgtgacataaggcaacagaccgagcctaac

SEQ ID NO: 195451 - DNA, 1283 bp, Arabidopsis thaliana landsberg
atggaagctaaagctacaaacttttcgctgaaattcttcagaaacattcgacgaaattcactaaaaaaaaaggtaaagagtataaaaagagcaccttcttgcctaagtgcctcgacgtcattcatatgtcaaatcagtctctgcatccaaaacaaaaaccctcaatttgataagcatcaaactaacccttgagttcattaaaacaaacaaaatcaaaatttgagatgaaacgcatgtcctaacaacccaaaaccctaaagagaagcttctattagattttgcgttctttacacacattcacacaaaatttgaacaaggagacaaaacagctcaaatgggtcggattcagattgcaccaaagatgaataatgattggttcaagtacaaatactatagaagatgaatgagaagaataactaaatcaattttacttcgtctagacaaatgaacaaacaccttgtgagcgcatccaaaattcacaaaaagaacacaagtcaaattaagcgcaagaacatctaaccttgaaaggtacggaaattatattcgaacggtgaatctccggtcttgtagactcttgtcttcagacaatcgtgaagagattagtctgaagaaaaaacttgtagaaaaaatgacaaagatcaaaagcgcaaaaacctctagttttttacttctatgtttttcttgtttgtgatacctaaaatgtatttgggataaaacccaagggccaagtctataacaattttagcccaaaccaaaaaaatatcttattcgagttttttttctgttgaacagaatttggttcacctaaaagtgcataaacttatcaaaactccgcaattaaaggtgtttagacgaaaaaaatactaggatggacgatcttcaggatcgtgttggataaattgctaaccttataataaaaattcaagggtctttttatgaattaagtgtttatctatgatgacgaaaaaacactagtataaagcatagacattgaatagataaagtgaagaaaaagaaaagaagtctttcattttatttatttgtatagccatgataacacacattcgaggaggaatgaaaaaaaggaattcgaaaaaaagaagcgttcgatgggtttggcacaaaagtaagattttgcaaaatacaaagaatcacaacaaagagaaatctctcccaaaataggtaaataaccaaacgcaaaccggtttgaatcatctctttcctcttttcctttctttcatcaggcagtaacttggccgaacaacgacttacggatctgttaa

SEQ ID NO: 195452 - DNA, 183 bp, Arabidopsis thaliana landsberg
agataacgaaacgcgaaaacccaactgagaacgccatcaacggagaggccttgaagcgtttagcaagagcggcgagaacacggtggggattggagccggagaagacggaaagagaaccagatggtcctggaatcgaaacccgactcttggatgacccggtccaggcccatgccagcccacctg

SEQ ID NO: 195453 - DNA, 197 bp, Arabidopsis thaliana landsberg
atcaactaacaatgagaaaatgcaggtcctctggcattcgtcatgtctggatagtttgctgttttcagttcatgacaatacaccttcaactgttgtcaatgatcctgcttggactgctgctgttcgatccttataccagaaagttgtacgagaatggatcataatatcgctttcatatgctccatgcaccagtcagg

SEQ ID NO: 195454 - DNA, 99 bp, Arabidopsis thaliana landsberg
atggcgagccaggcctatagcacgctgggcactcccgcaccggggtacgccgggcagatcaatgacgccggcacggccatcagtacgttccgggcgacg

SEQ ID NO: 195455 - DNA, 542 bp, Arabidopsis thaliana landsberg
atcccatccgacacaccaccgtcacatccgggttcgaatcctccagctcgagctattcgcgtttcttcatcttctctctttgtgccatggtgtttcaccctctttagggacatcacaatctttggtttgagagaatttgaaatcctcctctaggatttgaaaattatggctagggtttatagtaattgggataggctggttcgagccactttaagaagagagcagctgagaaatacaggtcaaggtcatgagcgtgttagtagcggacttgctggagcagttccgccatcacttggtcgagctacaaatatcgatgctatcttacaagctgctgatgagattcagtctgaggatccttctgtagctagaattcgtaagtatttgtgtcattatttgagtgggattcattggctctactattaacactgtatttgtctgatgtagtatgtgagcaagcgtactctatggcacagaacttggaccctaacagtgatggtagaggtgttcttcaattcaaaactggtttgatgtccgtgattaag

SEQ ID NO: 195456 - DNA, 310 bp, Arabidopsis thaliana landsberg
atggacgccgccctggatgccatggccggcggtgaaaaaggtatgacaagggcgatgcgagtataaaaccaaccctccggcgcctggcgaccagccacctgccgatcaacctcctgccggcaccaccaacgacgcgccgccagccgccgagcagaagccagccgacgacaaggcgcagtacgaagccgagcgcgatgtcgtggcaaagaagtacaaggcgaagttcggcaagctgccgcactacaaatggaccatcgagaagatccgcgaagagctggccaagcccgcccctgagaaagagggcgagtaa

SEQ ID NO: 195457 - DNA, 1167 bp, Arabidopsis thaliana landsberg
atggcaccaaacacgttagcagaaacatcaggcaggtatgatcagagagctctcaataatttcatcacaggctgcaattgcacttggattaataaccgaactaatttagtgctttaaattcagtttcttcctgtgaaaatgcataaacattgaatagtttatgatacctgcagagaacacggtgtctacatggaagcagtacaacactgatttctctttcaaaacataccctacacagcactttctcctggaacagagagaacatcgagatatgaaattcagtccaaaggaaaagcaacaccaaaagagaaacggtgtgaaagctaaaccctgagaagtgtaatttataagaagaagaggtgagagcattacattttgcagtctctcatattcctgctgactgaatttcgtgatttctgtttgttcaccaagtgctgcttgaagtctccacacctgacaccaaattatagatcaaatacaaaaagacatgaacagcactgagtaataatgataccagagatctaagacttaacaaacaaaaaaacgacgacatatttgcatgtaagagaaaaaaggcaaaatacctcctccgcaagctctttcttcggcattttcttgactatttcaggcggatgaccacagaaggtattgtacctgcaccacatatattcatggaagtcttcagcaggtagttataaccattttcgttggaaaatttagaaggtttagttgtactaacccagattcttgatcaaagtatagtcgagcttcctcctcccagcttccttcatcaattgaccaccaacctagtagcctaagcgagcacgtataggatcaaatgtcaggcatcaacttgatgtttgttagtaactcggttgcagctaccaaaatatattttatggttagcctccatacgcattaaaaacagatcaggaagtaactaaacataattatcacctggatccatggtgcaagaaacccaagcaatcatgtgctctggatagaaatctaaaatataatcctgtatcatcttcgccacgcagcagtagaacaaccttctctattagtttagaagcagcaaatagaacaccaacgccttgcaaaaggaaaagtggagaaaacaggacagggacagatatagacttagcagcttcaggagtcccctga

SEQ ID NO: 195458 - DNA, 272 bp, Arabidopsis thaliana landsberg
gatggggtctcattgccaaatactgaaaagattttaccttttggaggagaggtaagtatatatgtatcatttctctgttttcatattctcttgagctacattgcatactgaaagttctatatctacatataaattttcaggatatatgtagatgccttctatggattcagaggcattaccaaaagtggccacaaatcaacacagatgttttcgcaaagccaatcgatatgctgatgcttaataaacttaaagagtcattttgtgaaattaga

SEQ ID NO: 195459 - DNA, 89 bp, Arabidopsis thaliana landsberg
attcaccttctttaccgaagtttgattacaaatttacaaagtatcgtgaaatcgtcatgggtaataaaatcatgacaccaacatactaa

SEQ ID NO: 195460 - DNA, 270 bp, Arabidopsis thaliana landsberg
atggtagatgattcgccgcggggggaaattggttttgacgggacgtcagcggaggttcagaaggactaaattcgaatcaacagcggtggcctaattagtggggcagcccgacgttcatgcggtgaaacattccttaacccgcagcaatcaaagcgcaatttggcgtgtcttgaccggccacccatacgtggtcggccaaactagcgagttgttgacgtgcgtttcaacagagtgcgcgtggcgatcatggccgtgctcaggtcgttcgtg

SEQ ID NO: 195461 - DNA, 99 bp, Arabidopsis thaliana landsberg
atgaccgtcttgtctcacgattgtaccgatcaaaccgttgtcggtgtcatcatcaatgtttcgggtctggtagatccaaggagacttgtagtacggaga

SEQ ID NO: 195462 - DNA, 255 bp, Arabidopsis thaliana landsberg
aacaaaaatcgaaagctgatacttacaaatcctcagcatctatatctgaccatagatctttcgtcacggattccagaaaaccatcacctgaaagccaaaatcgaaactaacaattatgaggaactatccttctatgtatcggcacaccaaaaaatagaaacaaaaacggtaaataccttgagatttcaacgaatagcaagaaccgaagctcaaaatcaccagaagaaacacgagagtacgattttgaagccttaa

SEQ ID NO: 195463 - DNA, 135 bp, Arabidopsis thaliana landsberg
gagtccaacatgacgctcctttcttatccaccaccttcacatggtgttttcttcctagttgtctcaatctttgttctgcaaaaggccgtcctaaaacgtcgtcgtatccaactctatcgtcaactttgtaaatga

SEQ ID NO: 195464 - DNA, 440 bp, Arabidopsis thaliana landsberg
aatatatttctttcatcagtgaagcattcagcaaatatatttcactatcgcaaagaagaccagacctcatcaccaagaacgtgaataccaatacacgaacatcagtggatgagacaaacatcagtcaacagctaagtactaagaatgataaagaggagaacaaagatgagagtttggatgagtcttcaacggttaagcccattcatcatacaaggagacttagcgtacaagataggattaacctctttgagagcaaacaaaaggaaaactccaactctgcaggaaacaaaccggtggttgttgcgaaatccacagaattgaagagaccttcctctgatacctcatcaactctccctgcattccctgagaagtctgttttgagaagatggagtattgttagtgacatgagctttgatttacaatggaaaataagaatctga

SEQ ID NO: 195465 - DNA, 106 bp, Arabidopsis thaliana landsberg
atgatgaattctacagcccaccagatgaccattatgattgttaaatggaatgttccaactctactttgcactcgcaattggataagaggttttgcaaaatatgaag

SEQ ID NO: 195466 - DNA, 2077 bp, Arabidopsis thaliana landsberg
  unsure (1)..(2077): unsure at all n locations
tctcaattatctgaacggtacaatcccaccggagatcggaaacctccagaaactcgagcaattcatagcttggtacaacaacatcgccggaaaaatcccaccggagatcggaaaactacaaaacctaaaagatttgatcctcaacaacaatcaactcaccggagaaatcccaccggagtttttcaattgcagtaacatcgaatgggtctcattcacaagcaacagattaaccggagaagtgcctaaagatttcggaatcctttcccggttagccgttcttcagctcggtaacaacaatttcaccggagaaatcccaccggagctaggaaaatgcacaactctggtttggcttgatcttaacacaaaccacttaaccggtgaaatccctccccggttaggtcgtcaacccggttcaaaagcactttccggtttactctcaggaaacacaatggcttttgttagaaacgttggaaactcatgtaaaggtgttggaggtttggttgagttctcagggatcagaccagagaggcttcttcagattccatctcttaaaagctgtgacttcacaagaatgtattcaggtccaattttgagtctattcacaagatatcaaaccattgagtatcttgatctttcttataatcagcttagaggtaaaatccctgatgagattggagaaatgattgctcttcaagttcttgagctttctcataatcaactctccggcgagattccgtttacgattggtcagctcaagaatctcggtgttttcgatgcttcggataatcggttgcagggtcaaatccctgaatctttctcgaatttgtctttcttggtgcagattgatttgtcgaataacgagttaactggtccgattcctcagagaggtcagttaagcacgcttccggcgactcagtacgcgaataatccggggctttgcggtgttcctttaccggaatgtaagaatggaaacaatcagcttcctgctggaacagaggaagggaaacgtgctaagcacggaactagggcagcttcttgggcgaatagcattgttttgggagtgttgatttccactgctgcggtttgtattttaatcgtttgggcgtttccggttcgtgcgagcaggacagatgcggattatgcgaagatgcttcacagtttgcagacggttacttccgccactacatggaagatagagaaggagaagatgccgttgagtattaatgtagcgacgtttcagcgacagttgagaaagcttaagttttcgcagcttatcgaggcggcaaacggattctcaaccgcgagtatgatcggacacggcggattcggtgaggtttttaagccgacgcttnnnnnnnnnnnnnnnnnnncgatcaagaagctcattagacttagttgtcaaggagatcgagagttcatggcagaaatggaaaccttagggaagatcaaacaccgaaacctcgtaccgctcttgggatactgtaaaatcggggaagagagattgcttgtttacgagtttatgcaatacggaagcctcgaggaggtgcttcacggaccaagaacaggcgaaaaacggaggattttaggttgggaagagaggaaaaagattgcaaaaggagcagcaaaaggactttgtttcttgcatcacaattgtatccctcacataatccaccgcgacatgaaatcgagcaacgtgcttctcgatcaagacatggaagcaagagtttcagatttcggaatggcgagactgatcagcgcattagacacacatttgagtgtaagtaccttggcaggcacgccaggttacgtaccaccagagtattaccaaagtttcagatgtaccgcaaaaggcgacgtgtactcaatcggagtagtgatgctcgagatcttaagcgggaaaagaccaacggataaagaagagtttggtgatacgaatttagtaggttggtcgaagatgaaggcaagagaagggaaacacatggaagtgattgatgaagaccttctaaaagaaggttcttcggagtctctgaatgagaaagaaggttttgaaggaggagtgattgtaaagaaatgttag

SEQ ID NO: 195467 - DNA, 103 bp, Arabidopsis thaliana landsberg
atgcctggggttgaggaagctaaagtgacagcagggatggtagttaataccaataatgacaagaggttggctattggtgccgtcacccaatctgtcacaaaag

SEQ ID NO: 195468 - DNA, 1160 bp, Arabidopsis thaliana landsberg
aaaacagtgttgtggagaggataaaaagacagaagactaacgataggaacgaagctgctagttcaagtgttgttgataaagatggctttgaccgcttgcgatttatctctcatgatgctaagaagaggtcgaaggtgattctgtcaaggtatgtgtgcgaggaatggagtacaaattctctcctgccaagatcaactcttcgtttggtctgcaattagttgatgccagagctctacaggtgcaaattgctagtctgattgatgatgaggtcaccagctatctgactaacggacaagtgaaggttcttcagagtcttcccatgagcaccttctcggagaactgtaggaagctgttcaagttctcgtgcagaaattggtctccaacgaccagcgagggatatgcaagtatagacagggttttgcttatgtatcggattgcacacaagttggcttttgactttgggcagatggtgtatgagcatattgtgcatcttgctttgaaagttgaggcaaagttctattctgcagcttgctttgaaacctgaggcaaagttctacattccgtttccgagtcctgtgtatcaacttcttcagatgcagcatcctgtgaagtttgttgagaagccagagcccttagtccagactaagaagaagactgcaaagaagccatcaacccaaggagtgcaagctggtgactccactgatggttcagaacatcgtagagcaatgaaactggccattgaagttctgcagactgctttagatgcaagtaagtgttattctgttttcctttgaaatattatatctcagctaatgatgtttgtgtgatttttgactaagtcatgcacttaagcaggaggagatatgtctgaatctgatgatgggagaaactaatttaagggggagcttgatgtttttaacgtttaaaatcttgtttttgacaagcttgtttttatttcacaccatgcttttatttttgttctttttgaactgatgatatgtatcctctgaaaacttgggtctgtaataagttaaacacagctgcttggacgaatcttatcttttgataggtatgctagaaacgtttctagattttgtcttgttgctgtgtttgggtttccttctgtttgactttcaggtcccgtcaaggagattgtttga

SEQ ID NO: 195469 - DNA, 222 bp, Arabidopsis thaliana landsberg
gtatatagttcaataatcgtgtatgatcaaaaggacaagtattggaaactcttgagggtttacaaggtttccggcgaacatccagttagtggtttttggacagtgaattctaagcgttgtcgaactgttactctttgcagaattcaggtatgcttcagtgatgagtatgcttttagtaaaagtacttttgatgatgaagatttcagattttcagacttttaa

SEQ ID NO: 195470 - DNA, 267 bp, Arabidopsis thaliana landsberg
atgcgctcgttcccgcgctatgtcccgtgcgcattgctgctgctggccggcgcgctcgagctgttccggctcgaggtcggcacctacgtgcacgtcgcggccaacggcggctaccgctcgcccgggcacgcgctgagccgccatgcctcccgccactgctggggcacggccgccaacatctaccgcatcggcgacacctacctggacagccgcgaagagatcgagaagtacgcggccatcgcgcgccgcgtcatccccggcgtctgg

SEQ ID NO: 195471 - DNA, 607 bp, Arabidopsis thaliana landsberg
atggctcctccggtaaaccaagccgccgcaaacgattctctaccagagtcgaccgaactcagtgacgcgacagctccgccgttgccagaacctccttcggtgacttccttggcgacgcgaatgacagctgctgagaaagagatgctctatctgcgtgacgcagtcacccagatcctccgaaaccagatcttcggcgttcctcgtgaaggccacaacactccgatgggtttttcatcccctgttccgggagtacagtttcctgcttctcaaactccaagtcacgacattcaaaaccacgactttatgtgtgtgggtcaaaacccagagacacagctccggctgcgcgaaactcgttttcgtcctccacccttagaccaaccgcgatttcaggcttctccttcggagcctctccgctttcaggcgtcttcttcggaaccaccgggcttctcaacacccccgtttcaacatcaaccaggcttgcagaccggactacagttccagcaacctgttcccttccagacacctccgttacaacagcagtgtccttcaccacgtcttcgaacagagacaccacaaaggacggtggagttgcctgcttatgagggtg

SEQ ID NO: 195472 - DNA, 269 bp, Arabidopsis thaliana landsberg
gccttaagctcggcgcggatggtcttgtaggccgccaccacatcgtcctgcgtgccgtcgaccagatgcagcagcgccgccgtgcgctcgacatggccgaggaagcggtcgccgaggccgtggccttcgctcgccccttcgatcaggccggggatgtcggccatgacgaaggtctgctcacccatatcgacgacgccgaggttcggcaccagcgtggtgaaaggataatcggcgatcttgggcttggcggccgtaacgaccgacaggag

SEQ ID NO: 195473 - DNA, 605 bp, Arabidopsis thaliana landsberg
cttcttcatctcatctttctttcttacgcaaacacaagcaagaaaccgccaaaccttaaccggactaaccgataaaaaccacattttattcatgcctgagaatcaccggagcacgatggatgaggaaaacgagcaagagccagcctttgtccgagagactggacatggttatggtctctatggccatcatgagattcacaccaacaacgacgaaaacaagaacagtgacaacgatcaattttactatagaagcgacgcttatggaaaccgcgatggtagatttaagtagagagattgagatcagttatgttttcgtataatttggaattcagttatgttttgtaaccgaaaagttaaacaaagttttttgtagtttactttagagacttttatctttcacaattttttttgtgtggttacaacaagataatccttcaataaataaataaattgtaattattgatactataataataatagaagtgacgtcaaaaaaaaaaggtaatttagattacctcattttcctaacgacaacaacatcaacaacaacagcgagtcgcggaagagagattgagaaagaggtaccaagactgattcgaaacaag

SEQ ID NO: 195474 - DNA, 286 bp, Arabidopsis thaliana landsberg
gaagaccaacccccgcatcggctggggcatccccgcccaggggatgtctagcatcaccaacttatcagtcaacatatacatcgcccgcacgctgggcgctgaccagtacggcgctttcagcctggcgtacgtaacgtacgcctttatcctgaacggatgccccggcctgtcgacccacccaatgctggtccggttcaccgacgtcccggtaccggagtgcaagcacgccatcgaccgctccaccgggaccgccatcgtggtcggcatcgccagcgggatctgtgtg

SEQ ID NO: 195475 - DNA, 141 bp, Arabidopsis thaliana landsberg
gagcatttggtttctaagggtttcatgtactggatggaagaactcgtgtctgagaacatcctctgcgctggttcgttgcctcgggttaacggtcaaacatctatccacgaagtcaaggagcggccgcgggattgcgtctag

SEQ ID NO: 195476 - DNA, 878 bp, Arabidopsis thaliana landsberg
catagttctgaagcaagtcctcctgacggtgtcttggcagtgtcgcttcttagacatcaggtttgtattttattagaaaagtgataacatccctgtagatgtttaaagggacgggctgtagaactttagattttgcgtgtctatttttaaagtgtccttctgtttgcttaactaagatgatttaggccttaatattattcaattgatatggttttccaaatagatggtgggtttttgttagaatatttagtgttaatcgacactgaccatacattacacatgaacagcgtattgcattgtcgtggatgtcccaaaaggagacaagcgggaacccctgttttgggggcattcttgctgatgatcaggttaatttctactgttgtaatctatataatattaccatttactatacgttcagcacaacaaatatatatgttataaaatttccttgtgtaattatctttttctgcagggacttggaaaaacagtttccacaatagcgcttatactgacagaacggtctacaccttatctaccatgtgaagaagattcaaagaatggaggatgcaatcaatctgatcactctcaagtggttttcaatgaaaacaaagttgtcgaagatagtttatgcaagatgaggggaaggccagctgccggaactcttattgtctgtcccactagtttgatgagacaatgggctgatgaattacgcaagaaggttactcttgaagcacatctctctgtgctggtataccacggttgcagcagaacaaaggatcctcacgagctagctaaatatgatgtcgtcattaccacatattcccttgtgagcgtggaagttccaaaacagcctcgtgatagagctgatgaggagaagg

SEQ ID NO: 195477 - DNA, 140 bp, Arabidopsis thaliana landsberg
tagatttggctcgtcgaacgtattccaacggatcatcttcggatctcacccataaaggaaatataataacacctacgaagtttccccatctacactttgaaccttttgccatcatattcgccagatcctacattgattga

SEQ ID NO: 195478 - DNA, 464 bp, Arabidopsis thaliana landsberg
tacctcgaccggtgctacactggatccaatgaccggtgccactacagtaatcggtactggtgatgacgatacaccaatgggttcacctgcctctatcggatttaatttcgtatacgaaggcgtgacctatacccagtattcagcttcacctgacggatggatccgcctgggtggtggtacggcctccaaccagttcaccaactcagtaacaagtacgaccaacattcctaaaatttatccttactgggatgacctggcaactggtaccacaggtaacgtacaaaccttagtaaccggtactgctcccaacaggatctttatcgtacagtggttcgtgaccattccgagggctacttcaggtccggccaactctactttccaggcctggttgtatgaaacttccaacaggatcgagtaccgttacggtgccatgggcccaacaagttccggatctgcttcagcag

SEQ ID NO: 195479 - DNA, 89 bp, Arabidopsis thaliana landsberg
atcaggtggatccgattatcggattcgggtcggatccttttgaaggtacacggatttatgtgtatgttttgtatggaaattgtgaataa

SEQ ID NO: 195480 - DNA, 181 bp, Arabidopsis thaliana landsberg
attttaagcttcggcatttcaacaagttttgatttgatggctggtgagaaaaagactgtcgacccagcactgtccaagttttacaaagctatggagaggaccaatgcagaaaagattgcacatgagacattagccgggatatctgaggattccagtgacagtgaagaccttgatgcagaaa

SEQ ID NO: 195481 - DNA, 126 bp, Arabidopsis thaliana landsberg
ttactaataggccatgaactagatccgaatcattctcaaaaagtaatttcttatgggggaatggttaaagtgagggctagtcatgtgcggactggtgctttctcactacgggacaatgggaactga

SEQ ID NO: 195482 - DNA, 299 bp, Arabidopsis thaliana landsberg
atgtactcgtacaaaaaaataagttaccagatggaagaggtaatgtcaatgatcttccacggaatgaaactagttaaatcgctcgagtccagcttaccggaaaagccaccggaatctctattgacatctcttgacgagatcgtaaagacattcagtgatgcaaacgagcggctgaagatgttactagagattaagaactccgagactgcgttaaacaaaaccaaaccggtgattgtgtccgttgcaaaccagatgttgatgcagatggaaccgggtctgatgcaagagtattggttaag

SEQ ID NO: 195483 - DNA, 710 bp, Arabidopsis thaliana landsberg
atgatgaaagatagtgtggctgctgggaatcgagcccaggtccctacggccacaacgtggaatactaaccattgtattacagccactttgttatacattcaaagtttctatatttagcgaataaccattgactcttcgcttgtatctttccgttgagatttaagtaaaatcattaactctctgccttcttccacttcctccactaaaaaccatctttaatcataattaaacctcaaaaatcctttcattatcacagtattataaatagcagctcttaccgaatactctaaaccatcacacaatacaacacaaaatctttaaaagaaaacacaatgacttctaacaaaagtttcctctttgtcaccgtcactcttctcctcgttctcaatgtctccagcagatcactcccgcccgtggcggattccaccaacatagcggctagacttaccggaggaggactgatgcagtgttgggatgcactctacgagctgaagtcatgtactaatgagatcgttctcttctttctcaatggtgagaccaaactcgggtccggttgctgcaacgccgttgacgttattaccactgattgttggccagcgatgcttacttctcttggctttacatctgaggaaaccaatgtcctccgtggtttctgtcaatctccgaattctggcggttcttctccagctccttcccctgtcaaactttga

SEQ ID NO: 195484 - DNA, 120 bp, Arabidopsis thaliana landsberg
acaaaattggatctgtccctcttggaggacatcacgaatgattttgatttctgcatgaagctggcccaagaggaaaatctcgtctttctacctggtaatcaatatgaaactccttttcag

SEQ ID NO: 195485 - DNA, 79 bp, Arabidopsis thaliana landsberg
gtgatccgacgactggctctcttctctgagaagcaggaccagcaagatgccatcatcggtgcactgatcattggtctaa

SEQ ID NO: 195486 - DNA, 116 bp, Arabidopsis thaliana landsberg
atcaaggtcctgcaccttacaagaagcctcatgatttgaagaaggcgtggaaagtcggcgttttgactgcggctatcaagcatatgcttcctgatattgctaagatccgtaagctc

SEQ ID NO: 195487 - DNA, 101 bp, Arabidopsis thaliana landsberg
aaatgattaaggttaagaaatataatttgtcttactttgtcaaatctgttgctagtaggatcatagaaaggagtattggagatgtcgcatttggttggtga

SEQ ID NO: 195488 - DNA, 217 bp, Arabidopsis thaliana landsberg
atgtgtatggtaaatgaaaagattgtacgagcactagaaggagatatgtcaatggatgatctaagtgagggaacaagaccaggacaaagcacgtacttgagccccgggagcgtgagctcagagtatgacgcaagctcgtacacggcagacatgaaaaagttcaagaaactggcgttagagaataaagaatatcaaagcagtgaatatggtggaacaa

SEQ ID NO: 195489 - DNA, 158 bp, Arabidopsis thaliana landsberg
agaggctttacgctacacaatatatgggaagactggcgtttttgatgctgaaagattcatcgatgtgatgcaagcctttgagactttcattacagcagccaaaagtggaggaggggaagatatgaatggaggcatggcagagatggctcttatgcaaa

SEQ ID NO: 195490 - DNA, 610 bp, Arabidopsis thaliana landsberg
atgctggacgtgccggagcccgctgcccaatgccgagcaggcgaatgcggcgatcaagcagctaaccttggccgagggcgaagatccctggcaccgtgacggctggctgtttcaggcgatatcgtggattgcggcataccagcagccttctgcctcgctcatccgcataccgcatattccacctcgggcaccgcggtcgccgttttcgaagacaaggccatcgataaggcccacgagcctcgacgggctcacaccgaacgaattcgcaaccaggtccaggtcgaaccaccacgtgaacagggctaacttataaacgcggacaaaacggggagcacgtcatcggcaacccgggcctatcaggccgatctgggatcacatttttagccaagccgccaaactgactcaccaagcaggttcacctcggcactgatgccggataccttccggcgtatcagattttttagaaactccttgctcaaccgccagggctcaccccaatcctcccggctaagtggtcgttttcgcgcgccggatcacagctcgcagcggcctctagtgatactgttgcaccacgttccaacaggcatacctgatcaaaaacatgcttcaa

SEQ ID NO: 195491 - DNA, 231 bp, Arabidopsis thaliana landsberg
tttatgcaacagcgcgttgaagatcattggcacacagctatgcatgttgttcgctacattaaaggtaccgctggtcaaggaatcctcttgagttctgccaatgattttaaggttaatgggtggtgtgattccgactggtcgagctgtcctattactcgtcgttcagtgacggggtattttgttcagttgggacaatctccaatatcatggaagacgaagaaacaagacacg

SEQ ID NO: 195492 - DNA, 144 bp, Arabidopsis thaliana landsberg
tggatctccccggtaacaacgccaaaaagcttgatgcatgttttatttcgcctcacgcttttacttgaaagaccacccgactactgcaagtgcagagtatattggagtagtattttaggatcgaatccacaaggagagaagtag

SEQ ID NO: 195493 - DNA, 65 bp, Arabidopsis thaliana landsberg
gtttctcttctggattggtcatcgtcagagatttaccaaaggaaatcggtcatcgtcagagatga

SEQ ID NO: 195494 - DNA, 745 bp, Arabidopsis thaliana landsberg
atgggcccgagagaggacgtgaggcccattggtaggggcggttggggcgttacataaaccatatgattacatagctgagagagactcaagaatcagtaatctaagagaagacgagctgaaatatggtactcgacgagacccactactatccaaccccacccgaacctaccaaacaaaactcaggttatttctagacaatgattatgagtattttggacctgaatcttttgactttgcaagacgtgagagagattatctataatgggaactcaacatagataagtacttatgttttttatgagggagagatatgcaccacacagtcttccccaacgtagtcaacacacttaccatccaaaggaaccaagctgagagaactctacaaatctacgtgttagttcaaatcaaattgcgaatcaagatcccgctaagaagaatgagattggtacatgtgcaaaagaagacccgagcctcataccggtaattgaattatatactgaaccgcatgctgaactaaagaaagttcagtcctatgattctttgaaatcacatgaaccaacatgttatagatgtcataagaagggacattttgatgcaacttgctctaaaagacaagtagtagatgccacatcactagagctgaaagtaaatgcatctagctccaatgattgtctcgtaaattcaagtttagaaattcagaattctagattaatgcacatgtctttgccaacggttactaatacag

SEQ ID NO: 195495 - DNA, 865 bp, Arabidopsis thaliana landsberg
atgcaaatggaggtgcaaagaaggatagaggaagaggtagtaatagaaagacaggtgaatcaaaggatagcggcacaagggaaatacatggagagcatgttagagaaagcatgtgaaacccaagaagcaagcctcactaaagactactctactctatttttcgaccgcaccaatatttgtaacaacacatcgtccatcccaatcccatggttcgaggatcattttccttcctcttcctccatggactctacgttgattctccccgacatcaattccaacttctccctacaagattctaggagttccatcactaagggccgtacggtttgtctcggttagagaagagatatatcaaatatagatctagctacttgactctttcttctctagtttctaatgcgcacttggtgtataaaattatgcacaaaattacttgtaataacttatgccaaacatatgaagtcttcgttattcccttgatctatatatgcgatgatgtggaacgtatgctgcctcatgattatcacaactcttgtgttttgttatatatgtgttcacttgcacaatgatacatatattttactcaatttggacaattctatagttctaaattcgatcctagttctcacaacctgatttggtgttttttgttcttcggatggttttgttttttctagaagcccatgatatatgaatttatatattttaaagtcacatccatttacatgcaaaatctctccggtcaatttttgtttataaaagtttatatgcacaattataaccgatcaatcttgcgtctttctatctagtcacttttctagccatcatcaccacccaccgatactggcctgttcatctccagtag

SEQ ID NO: 195496 - DNA, 111 bp, Arabidopsis thaliana landsberg
ataataatttctgaatatcagcaaagatacgacaagtttggttcaacgattcgcataactgcaaaatgtgttgataagaaactcatcaatcgctattcaattagcgtataa

SEQ ID NO: 195497 - DNA, 336 bp, Arabidopsis thaliana landsberg
atgctggctaccctggatacagccaatatattattatcaaaacccaaaaacgaatataccggtaatgtagataatgccgatgtttattatcacggggatcctactaaatggagaaagctggcaaattcactggcgctgcgttattatatgagaatttcggagaagttaccggatatagcaaaagcaggcattgagaacatcgtaggcgaccctgttaaataccctttcatcacttcagcttctgatgatgccctcatggattttgcaggaaacagcagcagtgattcctggcctactaatgtgctttacgattccgacagcagcaattacaggcgg

SEQ ID NO: 195498 - DNA, 667 bp, Arabidopsis thaliana landsberg
atgtttcaacgcctcgggagacatcgaggagttatcccaaactgggccacaaaacacctcggagattgcatcaagaatccacaccgaggcgatatcgagaatgcttcagagcattctcgtgaaatggtcccccgacccgacctcgaaacacctcggacataaaacctggcaattcgtcctgaggcgggctccaagacccctcgggaacgtatcctcaaaaaccgcggtccgagcatcctgagcacaacccgagaccagctaaattacggctcggaaaaacctcgggttggacgaagaaaccttcaaaaaaggacttagccggtataagttcaaacacatcatttccaaaaaccccggaagagataatcttcaaagatatcaccgaatacggaaattcccagaatcttcggaagataaggacaatctacttcaacaacttaaagataaagggaaatcttccgagaatatcgcgagaggcgatattttcgagctctataaaaagcacctcgaaggaaaaacaaaaagacacgcacaaaaacgctctgattttgaaggcaaaaacacttattttcatactctagaacatttgtacgatcaaatcgatactttctcattaatacaatcaagaacaccgtccgcggtaattgagaattctgttgttctttga

SEQ ID NO: 195499 - DNA, 196 bp, Arabidopsis thaliana landsberg
gaaaacttaccggcaaaggactttaacatcatggatgaagcaaagggagctcaaacacctataatcaaaccatttactgcctatgtgacaaaccactttttaaccatccggttgagttgggctggtaaaggaactaccaggattcccactagaggggcttatggtcctatcatatcggctatttccatagcttcag

SEQ ID NO: 195500 - DNA, 35 bp, Arabidopsis thaliana landsberg
gtaagagctcgtgagaagaaggattctgagatccg

SEQ ID NO: 195501 - DNA, 574 bp, Arabidopsis thaliana landsberg
atggcgttccaaaacgtccacatctctgtttttactcgcaatgtatttattcttcaagagatgaacaaactaaagattttttcacaaacagtatgattgatgttcaattattatgttgttttgatcataaaataagaacctcttacattccacagtttagttctgtaattttgcttaataactccatcattttgttttaaaatattacgagttgaagtttatccaaaaaaacgttttgcacgttagttttaatgtccatgtatatttacattcactcctaaaaagggaaaaatgtccaactataccactatttaattttcttccaatgttagaatttacatgagaaatgtagcttctataaattagtgtggacttggatttggatatttcggctaccacctcaataaatatacttttatgtgtaagaaagtaaagtataaatatcatttgactactatttatcactttatttcaataaataaataatgtaaaaactctacagaatctctccacgtcgagatcggaccacgatcgactgctcaatataaattcgtcgaacaaaatcattggacat

SEQ ID NO: 195502 - DNA, 40 bp, Arabidopsis thaliana landsberg
gttcttagaagaccgagacttggtgctcaccgtcttgttg

SEQ ID NO: 195503 - DNA, 311 bp, Arabidopsis thaliana landsberg
tgggaccaatctctgaaacgacagctctcatctttattccggcgcctcttactcaacaatgggttattgatgtcggcttttggcacgcggggaactgttcttgcacagtttatccttggtctcctgacggtcctcttgagctggaggaacttcatacggcgcctacgtgggcggttttgcgtaatgtccctcctcaactatattccttagatggaattatagtcattgccagtggtattggagagcctctccacactgagaagtccaagcttgatccagtgaacattggctttaccaaagtcaagttataa

SEQ ID NO: 195504 - DNA, 489 bp, Arabidopsis thaliana landsberg
atgcaccgtctgaatcgtctggtcggtgatcaccagcggctcttcgccttcaaacatgtattcatactcacccagccggcgaccgttggtcagtgtcacatgcatttcttgcaagggtggcacaaacatgaactggtacataaaactcaacaggtcttgcgtattcacacgcaaatccagcctttgctcacctttgctcgttttcaaggtgatgatattggtttcccaatcaaatgttgcttcataggttttactggcgcggctgccaaacgcataccggtaaaaatgtggttttaatccatgcgggctgatttcaccctggctttgttgttccagcgatggatagagtaattttaacagccccttcccctcgaccagccaacgcaaactgtaatgaccggactcgtctcgcagatactcaatgttggcattgcctgccggtcgctcttcaccaataacgaaaatggaaaagtcagtactcacatgctg

SEQ ID NO: 195505 - DNA, 40 bp, Arabidopsis thaliana landsberg
gggatgcacgctgttgagccggaagccgtcgcgctactag

SEQ ID NO: 195506 - DNA, 162 bp, Arabidopsis thaliana landsberg
tcttatctatcggttgattcagactcaacatcctgacatccaaatactcagacgcacatctgcaagtgcttcacaaggtcagtcaactggtaggaaggtgccatcttcaacagcaccagccacttctctaggtcaacattctgcatgctgcattggatgcat

SEQ ID NO: 195507 - DNA, 135 bp, Arabidopsis thaliana landsberg
atggaggtaaaggcgatacacatacacctttccttaagagctctccaaggttaagtctttgcaatgtcaacacagctttagttgctttccaaatgaacatgagaagacctttagatgtcacgaaaagtgtaccag

SEQ ID NO: 195508 - DNA, 380 bp, Arabidopsis thaliana landsberg
ttacgttgttcctgcaaaaccttcaaaaccaaaaccacgtaaagaagaataaacacttctcttcatcggtaagtaagtttcccgcgcttgccagctgcttcttcttctgtaacatttggaaacaaaccgatccggttcttgtttctccctgatttttagcaccgttttttttttgtatatgttgcttataaatctttttttcatagttttaaattgatactggatttgcaattatatatacaataagtataaatatatatgtaattgtaaattgccaatgggaaaaagtagtagtgtttatgttttgatgttttttcttttacgttgtaggacttattattcatcaatgtaccccactaacaaaacagacgttcgtataa

SEQ ID NO: 195509 - DNA, 1532 bp, Arabidopsis thaliana landsberg
aaatcagtaaactctggtattttgaagatgaaccggtccctaagtctcacatggataaatttacatcctggtacgagaattaccgaagtgaaatgtcccaagcgatgatggaaactgataaggttaagaggaatcaattaaccaatgaagttatccagaggtacaagcaggtaagctctcgctcaatccaatgcaaagatctgaccaatagatttcatgaatcattttttgttgattagtccatataatgcttcttaacacaactcatcggttgaacggtttcttctgtctgtatcaggatttctatggcgctgcagggtttgaagacagcaataaaagtctggaagaactctacccccaagccttggcactctacaagatcgtttacgattatgccattcatgcaggtgttgcgaaatgtgcatttgtctggaaggtagcaggaccggtactgtgcagattctatctaaataagaaaatgcaggagaaatgtttagtgtgtgcaccatctgtgcttaaagagctttggggttgaagaatacaagcctttgttgttgctacatgtctaataataagaagcgtatgaggcaagtaagttaactaataggtgccaagatgtgtgtgttgtagtgccttttggtttggttttaatgtagatttctcctctggtgaatattttttgtgaatcttttgcctatgaaatgaataaaaatatgttacataacgaagcttttctattaacgaagctcttacctctgcaccagtgttttttgtaagattgaaatttgtaaaataaatgttgagaattttaaacaaaattttgatcgcgagattgtttgtttacttggcgtttaaagcgacggcttcaaagctatggcaactttgtaattttggtgactcgtgttagggtattttggtaaattccaaaataaataacaaacggctatattgtgtagcctgtataaaaaatcttcttcaagtcaaatccataaaatcgattcacaggaaaaaagctttggactttatttttgtttttcccgtgtgttgtcagatcatcaacgtcgcatcaacagcgcaatgaagaaatttgaaaaattgagaacagttccttcttctcactgggtacttgcttatttgtatgagaaccctaaagagacaactgtttttctcgttgggaaaaatgatgaccaccactatggattataacagcagcgatcaaggtttttcgtggtcagaaattgctcttctgggtagtgttgaaacaatgttggagaaagtctacgggaaacacaatcatcatcctccgataaaagtggagacaagacggagactttcttcgatttctgaggaattggctttggaaacactcattaaagttctcaatatgccgaatgtgaagacccgggatgggataatcatatattttcttaacgatgcggtcaccgttgatggctctcctcgcctgtggtctggcgagtctccagtacactttcctagaactcccgggaaaaaaagttgcagggcttctcaag

SEQ ID NO: 195510 - DNA, 97 bp, Arabidopsis thaliana landsberg
atgcttcttcttcttcttcgtctacctccaaatcagcccagtgtgtttgctctggaattcataattcatagtttccgattaaaaagcaagagaccag

SEQ ID NO: 195511 - DNA, 581 bp, Arabidopsis thaliana landsberg
gctagtgaattgatcaaagacatctgttccaacctatgtgctgcatcaaaagaagttggcaacactgactacacgattgttctgaggggtgattcaacattacgtggtcattttcctcaggcaagtttggtaaccctatcatgaaatagcagactatcatgtcaatgttatgatttcagcttggcatctgtttctgtcataacttgatattatgatccacacacaggaagcagatgctgctgtctcaatacttggggaaatggatgcatggattatttgccccttcttccttcaagggggacgttatactattgatgatgtgcattatgttgcggattctgataggtatgtctttgtgagcaacgtgtgtgtgtgtgtgtgtgtgtaattttttcaaactttcagaatcagggaaaagttcccttcagaggatgaagattgatggtcttcattttgaatattgcaggctcgttcctgcaggagagacagagtttgccaaagatgcatcctttggatataaatcctcaaatctccgtgaggtcttaattcttccaacaagggaatcatcttatgttatttga

SEQ ID NO: 195512 - DNA, 439 bp, Arabidopsis thaliana landsberg
cgtttccacatctttaaatgcctcttggggatcgcgggagatatctatacctacttccactaccgcctggtgcatctctgccttcaccttatccttaagcactttctggccttcctgcacgatgcgttgttcatggctcttcaactccctggttaccgggtccatcaccatgtactcttcttcaacgcccagggtaaaatgcttatagtctgtcatagggaggcggttagcgattagctgttagcggttagcattcatcatctgcgatgatgtttatggatatagtttttttccgctgctgctcctcttcacgtactctccccaggtaaggttatcggcgccgggtttgagtgactgtgctttttcgatggcataggtggcggctgtttccactacccattcgaagtttttctggccccacttttcaggtcggcatcag

SEQ ID NO: 195513 - DNA, 83 bp, Arabidopsis thaliana landsberg
gcgtctgcaaaaaaaactatgtataagggaaggaacccgaagcctctaggcaatggaagaagagcaagagctgaagagcaaga

SEQ ID NO: 195514 - DNA, 1870 bp, Arabidopsis thaliana landsberg
atgatcggagacttttccgttcaaaacgtgacggaaaacagtatatttgtcggtctctctcacaattgtactcggaagattgaagatatgaatccgcttttcggcgtgaatttcgcaccaacgtcggagaacagtttcttgatggagaattgtaaccgtaccaccgatggttgttctatcaagcatatgtttctggagaatgtgctgaaactcaaaagttgtgatgctactggaaacataagttgtttttctttagatagtaattcgagttcgaagaactcagctaagtttttcagtatgaagacattaaggaacagctcgtgtagtttgttgttctcgtcgatagctttcgagtctgtaggtgtgaatgcgggtatagcgttagagtttgagcgagttcggttaggttggtggcttaagggaggttgcgagagcggaacttgcgcggctaacacctattgtacagacgttgaaactcctcatggatatgcaggacaccggtgctcatgtcttgacggtttccacggtgacggatacaccaacccttgccagagaggttagtcaaatctagtctttgtttcaacataagtacataacgtctcttgttttcgaaattcgcgaagctgtttttgctaacttgtttactctatactctttgcagcactaccggagtgccgtggttccaagctcgtctggagacattgtagatctaatcttattactattgtaggaggtaatggtcgctttagtgtttgtttggtggttcaatgttttgttcattttggatctttgactaagtttattcatttgctatatataggaactgttggtggagcgtttttactagctgccttggctcttttcttcttttgtaagcggagacggtctactcctttgagaagtcatttaagcgcaaagcgtcttttgtctgaagctgcagggaactcgagtgtcgcctttttcccttacaaggaaatcgagaaagcgacagatggtttctctgaaaagcagaagttaggaataggtgcatatggtacggtctatagaggaaagctccaaaatgatgaatgggttgctatcaaaagacttagacatagagattcagaaagtcttgaccaagtcatgaatgagatcaagcttctttcctctgtgagtcacccgaatcttgtccgtctcttaggatgttgtatagaacaaggcgatccagttctcgtttatgagtacatgccgaatggaactctatctgaacatctacaaagagatagagggagtggtcttccatggaccttgcgtctcactgttgctactcaaacagctaaagcaatcgcgtatctccactcttcaatgaacccaccgatctatcaccgtgacatcaaatctaccaatatccttcttgattatgatttcaactccaaagttgcggatttcggactctctagactgggaatgacggaatcttctcacatatcaacggctcctcaagggactcctggttatcttgacccgcagtaccatcaatgctttcatctctctgataagagcgacgtctacagctttggagtcgtccttgccgagattataacgggattgaaagtcgttgatttcacacgtccacataccgaaatcaacctagcggctcttgctgttgacaaaatcgggtcaggttgtatcgatgagataatagacccgattcttgacttggatctcgacgcatggactctctcatccatacacaccgtggctgagcttgcatttcgatgcttagccttccacagtgacatgagaccgacaatgaccgaagtagcggacgagcttgaacagataagactcagtggttggattccaagcatgagcttggattcaccagccg

SEQ ID NO: 195515 - DNA, 165 bp, Arabidopsis thaliana landsberg
atgtatgaaagatggttgaaagagcaaacaaggctacaggatgaaaaaattaaatctcccccgttaaacaatgagagccaagaagcaatcgaaaacagcgagcaagttgagtctgatgtattacaacagaatggtgaactccaacaaccatccttatccacagcg

SEQ ID NO: 195516 - DNA, 633 bp, Arabidopsis thaliana landsberg
aactaggaagactaaattcaccaagcttcatgaacaagaagatgaaaatgctggattgtcgaatcatctcgaggagtcgaaaccaacgagtggtgttacaaatggcttcggtggtgatatgtgtcgcagcagctcggtaggtgaaactaacgttagtgggagctcttgtgttaagaatacacttgttgagagctcctccgggaaagtcgttgtgatagagcggttagttactggcggcttagctgaaagtccggcagttgagactgacagtagctcattagtggatgttgtaattgacgacatcaattttgtggaattgttacatgaagcgattcctgttgaaattctgtctgaaggaagcctggattttgaggtgaaaagactaggaactaaagttagaaccatgggaaaatcctatagcgtctcggagaagaaaaagcatggatcttttaagcgtacagcacagatctataaatctattgtgagaatgaagaaggtaaataatttggtccctgagaatgaagaggtttttgcggaaccagactttgcccgtgagggattagaagaacagagtcattctgccagtcttgctgaccagtccattttattccgagcaggccataaacaggaggg

SEQ ID NO: 195517 - DNA, 108 bp, Arabidopsis thaliana landsberg
ggaaaacttcaggaactccttaaagacttggtgaaacgtggaaattccctttgccgaataagagtgtcgatcgacatagatgtggtgtcaatcgacaccatcttgtga

SEQ ID NO: 195518 - DNA, 247 bp, Arabidopsis thaliana landsberg
atgattcatcatagaaggacgaaccttttgataagccttggggaagaaagggaaaggataggaagatctacgcaaaagaaattggcccgacatgctgggtatggtgttgattcaagtttggaatttcctagccggcggcagctggccgttgtagaacaggatttatatggtaaaccgaaggcaaaaccgaagtttactttcgctaaaacgtctgttgggccatatgctacagggtataatgggtatg

SEQ ID NO: 195519 - DNA, 176 bp, Arabidopsis thaliana landsberg
tacactccctattggggttggatcccgaatgttacgtaacactcgaagattgccacatgaataacaagtcgactgaactagaatcaacaagtgaattaccgaaccaaagtctcaagataaggttagacgaaaccgaaagctcagaggacatgcccgaaggggagcaagaaggttaa

SEQ ID NO: 195520 - DNA, 1289 bp, Arabidopsis thaliana landsberg
atggccacagttctggtgtgtgcaccatgcttgtaaattagagaaatctgctttatgatgttcaagaaaaaaacataaagaaagatattgtacaattgtggtaggtcgtaaatctaaaaatagagtttgtagttacgagttgcttcgtttacggtttttgacttttacctctctctttttttttgaagaacttgtcacatatgaggttgtacgaaagtctaaggttgtggtttttataaaaattagttgtgtatggctttggatcggatcaacctaagaatttgattcgattaaatcatgtcacatgaaatcaagcaatctgaccccaagaaaccctttgtgacctttcatttatcaactccaaagtttgaaaagaagatgagcagttcttgtacacatcctccttctagtactacaagaaaataatattataagacgtaataattagtcacaataataataataaaatttatcacaaaataaacatattacgagtttttgacgatttttgagttgttgcaatacaatcaatcacaaaattttattttgtaacaaaaacgtcacaagagttgcgacaaatatatctaataatcatttcgtcccaaatagttacgacacaaaaaagtaagaaaactgtttaaattacaaactataacatcgcttcaaaatcgtaataattcgtgattaacataacatcttaattacataattatagtctcaagtggtcactagtgataattaaaaatttgtcgcatattcgaaacaattactcaaaactgtggtttttgttactatcataatgtttcagtttatcattcactatgatgaaagtaagtcttaaatggtcacaaattattactaaaaatatttgcatatggtaacaattatcaactaaaaaattaacctcaaaacactattatttattaattattgtcatagtaatacacatttcttatagtcatatacattagctatatatatatatatatatatatatatattataatttatcgccattttttagacgggtagagcacgaattcgtcaattactaatagtggatgcacagattcgacgttaactctcagatggcaacccctatgaagagatttcaggctctctagaaagtaagactcagatctttccaatggtctgtagatcaacttttgattactcttgtagcaaagaggagagaaatccgtggcgatgatgaaggttacaccatcggtaaatacatcataaagccatcttccccaactcacaaattttacattcaacgaaaactataa

SEQ ID NO: 195521 - DNA, 240 bp, Arabidopsis thaliana landsberg
atgaccattgaagcacggttggccaacgcactcaaataccaagtcgatccgcttccaccagcaatcgaaccgacaacagcgccggtgtcgccacggtttacattcaatcccgtgtacaagaaaccattggtcagcgtgctgattgtcagcaacgatcccatcgtgtttatcgtatttgggttttgggcgaccacaaggccagttgtgggctctgtccaattcgttccaatcgcaatagag

SEQ ID NO: 195522 - DNA, 150 bp, Arabidopsis thaliana landsberg
tctttcacagctgccttgatggcgtcctccgccaacatactgaaatggagcttgactggtgggagagaaagaaatgggaaccttctatacattcattcttcccaaatatgttggaacaattgtttaagttaataagagaaacagccattg

SEQ ID NO: 195523 - DNA, 157 bp, Arabidopsis thaliana landsberg
aggagtgggagagaaagagctaagcagaaggcgaaaagagttttggaagtgttgagagctaaaattgaagatgatgatttggtgcagaatgaggagattgattgggaggagttgcttaattccggtgatgttagtcggagccggtgtcgactcggtg

SEQ ID NO: 195524 - DNA, 110 bp, Arabidopsis thaliana landsberg
cttctcatggaggtgagtggacagattctatctaccaaactatttactatataatgaacgtaaatctggtgcacccccatttggataatgaatggaatataggcccatag

SEQ ID NO: 195525 - DNA, 67 bp, Arabidopsis thaliana landsberg
atggaatgcgatagtttgggtcgtcttcgtgcgttatcgggttcccgagtacataaccctgtttttg

SEQ ID NO: 195526 - DNA, 1303 bp, Arabidopsis thaliana landsberg
cacaaaactgcaaaggcccgatgggtgcgattaagtcaaggatcggtccactcaagggacacgatctcgcctcgcccgagcccagcctcgggcaagggcagccgacccaggaggatttacgcctcgcccgaggccccctccagcaacggacacaccttcggctcgcccgaggcccagacttcaccaagaagcaaccctggccaagccgccacgccgaccgaccgtatcgcaggagcctttaatgcaaaggtggcctgacaccttatcctgacgcgcgcccttcagtcgacaaagccgaagtgaccgcagtcacttcgccgctccactaaccggcctgacaagaggacagcgccgcctgccccgctccgactgctgtgccactcgacagagtgaggctggcaggaactaagtacaacctcgggcgccatgggaagtccgcctcacccgaccccagggctcagactcagcctcgaccccggaagacggactccgcctcgcctgaccccagggctcggactcagcctcgaccctggaagacggactctgcctcgcccgaccctagggctcggactcagcctcgacatcggaggagcctccgcctcgccgacctcgggctcggacccgccatgtcacagggaaggccatcattaccctacccctagctagctcaggctacggggaacaagaccagcgtcccatctggctcgccccgataagcaagtaatgatggcaccccgcgtgcttcatgacgacagcggctctcagcccccttacggaagcaaggagacgtcagcaaggactcgacagccccgacagctgtccttccgccaggtccagcagctcctccgacggccacgacatcacacgaacagggtgccaaaacctctccggctgccacgacggcatatacttagggcactagctcctctctgctagacactgttagcacactgctacatctcccattgtacacctggaccctctccttacgcctataaaaggaaggtccagggccctcttacagacgggttggccgcgcggggaagaacgggacgacgcgcataagcctctcgctctctcccacgcggacgcttgtaaccccctactgcaagcgcacccgacctgggcgcgggacaaacacgaaggccgcgggtttccccattttacgcctgtctccctccaggcttttccccccttcgcgctccgtctcgtgccgacccatctaggctggggcacgcggcgacaatttacttgtcggcccagggaccccccgggttcgaaacgccgacagttggcacgccag

SEQ ID NO: 195527 - DNA, 1440 bp, Arabidopsis thaliana landsberg
atgttgagaattgagagagatcaaatctatgccaaaaccgcaaaggaagagagaagaggaatgaatataccagaggtagaaaacggctgccgcgatctacatcgcagcattccgaaatgaggtatcgcagagtgaagcggagccaattgtcggatttgagagatctcacggaaacctagcttcccgacggctttcaaggagatgagtctcggtgctgcgacggcggcggccatggcgaatctgttgttcaagtgaatccgtacaagtgaacctcgtaaagatcgacccagtggagaagaacaagagagaaaagtcttaattttgtcttagtttctgctcaaacaataataatatatagaatttcaaaaaagcgatacaaacgaagttatgtcaagtgtgtaaaagtcatgtttatagttggggcaggtcgtcgaataagaggagactcgatttcacgaatagaactgacctaggtattcgggttttgtatcggatacggttcatatttgttcggatgcgggtaattgtataatttttagttttgtggagcagtgtttaaaaaaaaaatgggtgaacgacctgtatccccatgggaagttttatatacgctcacaactccacagatttcggacctcgactctagtctacatgaaactaaagttaaaaaccgcgttccccctaaaagtaaagttaaagacctcgatccccatatttttgaatttcgtggtttattgttggtttactgtacggacccgatgccaaaccaaaaacccagttgattaaaccgtatgtatacccggttcgagttatagacaacccgaaatacccacccaaataaatacggatatgagaagaatccccaaatcaaaaaacccaaaaatcttagaacccagtttcgattttctctcttcaacatcaaatttcttcaattttcaacataagtgagagctctaatatgagtaattcatctggagctacgagtggaacatcaaatgtcggacagagaagaagagtttttggtgtgccaaagctatgttggtgtgaagctagtatctcggcgctaatttcaaagtctgccgccaatccataccgccgttactatagatgtgcttatgctgcatcacataaggtaattttattgttatttgggttgttgtttgaaaattttgattccaaatctctgttttttggtagcttatcgatgataaccacactttcaagtgggttgacgaagcattgttagatgagattgagagattggctagaagaacgactgtacttgaagaaaccatttcgcatattacaacagagtccacggatcacaagaagatggtgtttgagaggatgcaaatgaagctagagaaagagatttttgagagggtagaagaggagctgttggaatccaaatcaagcatgaagaaaatgtgcattgttgtcatt

SEQ ID NO: 195528 - DNA, 669 bp, Arabidopsis thaliana landsberg
ccttttctccattaaagctcattatcattgttggactcggtccacaaattcgaagaacaaattttggcatagcaagcaaaaatttgaagcccatttctgggattaataatgaggcccaactcccatctttgactagttctgtttattttggtaagttccttaaatttaatggctcgtttctttgactggtttggccttggactccaatcacgtcttgaatcaacattgaagataaggctccgcaatgatttactataaaccatgaaccaaagcttacctataacgactcctccaaaaccctcgagctctagatttggaagaacaccaataccacaaacagctccaacgcaccggatttcgttgatgacaagagtatctcttggatcgtcagttgccccttgtgcggtgacttcgttgacggcgcccgacaaataccaaaactggccttgtgattatttttggagattttcgcaaacctttacctgcaatagcaacctgtctcaacccttagcctctcaacctttagtctcttccgtgaagcaatttatcaaaagctcttatgcgtcattcgtgcgtgccgtttatgaccacatgttgttcagggatttcacgattgaatcctacaagacatcaaaagatcttccaaccattgcaagcttttcaaagtag

SEQ ID NO: 195529 - DNA, 27 bp, Arabidopsis thaliana landsberg
atgtggcgccggacagcggacggtgcg

SEQ ID NO: 195530 - DNA, 575 bp, Arabidopsis thaliana landsberg
atggagcatgaggaagagccgtgcaaatctcttcagattgagttctgttttctctggtttactaggaaccggagaatggtttcaagatatctgcaggtggaagaaaccggtagaaactacagctattcatataatcttcttggtgttagtgtgttcgccggagatgattcttccagtgatgtctctttgcttgttcatgcttggggtatggaactacaggctccgtccaagacaacctccacacatggacacaagactatcatttgcagacaatatccacccggaagagcttaacgaagagttcgataccttccctttttcgtctcaagacccggggattgtaaaaatgcggtacgagcggttaaggagtatcgctagtagagctcaaacggttgtgggagatatagcaggtcaaggagaacgagttcaggctctgttaagctggagagatccaagagcaacttcgatcttcatggtgctttgtttggtttctactgtcgttttgtatgttgtgccgtttaaggtttttgttcttctcgccggactatacatcatgagacctccaagattcaggg

SEQ ID NO: 195531 - DNA, 235 bp, Arabidopsis thaliana landsberg
atgacccagttttggtttgactggtacactgtaactgttaactacgaaaccctaaaaactaaatgtctaaaggaagaagaagaagaagcgatttttaagcaaacccagttcgtgaaaagggagaagaagcataccagacttcaactagcgaagattagagttttcttcttccaatgtcgattgttggttatagagaaagcactgaactttgatagtattgaacaatggcgtgaag

SEQ ID NO: 195532 - DNA, 467 bp, Arabidopsis thaliana landsberg
cctcttctgcgggaaatggtatcagcatccgatttaacaatgctcaagtttcacaatccagtcaccatagctcttccacagtggcacctacattaaacccggaaacatacactcaacaacgcaatgctcgtgatcattgcacagcgctacctggttctcagagcaacgtgttcactcgacatgcagaccagaacatacgtggtagtggaaatcgtcagtttcagacaaatgtggatcggtttgctccgtccaaagctcctcttactgctgaagattcgcatacagctacggtacaacagcaaccagggattaatgaaaacgtcttggagaccaaactatcggaatttgagaaatggctaatggaaaatcctaacccaaccggccctgttagtccgttacctgaaccgggaaatcaagactatgctagtacgttgtcatttgattttgaaacatttttgaatgattga

SEQ ID NO: 195533 - DNA, 221 bp, Arabidopsis thaliana landsberg
atacaataagtttggaatttgaggagtcctctagcaactcgtgggatgtagactgtactatctctgcaaacacaagggccgtattagttgaggtaatcgagtctcataatgtacgaactaatcaagctgatgatactgatgatgtaatattcataatacgaactacatatatcatgtcaggttatacattcgtatcagtgaccgatccatataagcagaag

SEQ ID NO: 195534 - DNA, 428 bp, Arabidopsis thaliana landsberg
atgcgcccccagtatgtggaaaaggcgcccttgaccacgcaatatacgtgcgtccgctggggctcgtcgcccgtggtacgtccgaccccttacccccatgggcactcgaatccggcttgtggtcctgccgacggctggcgtcgggttgggtccgcttcctgctctctctgtgcgcgcagcgtaacatctgctgaccctttgcggttgtgtggcttcgcgtgtagaatgcgacggcggcggcggtgccgaagggcaaacgcagcaagacctcatcgccgctgctagcgctgggcacgaagaagggcacggtggtggtgtgggacaccgtccgcggcgtggtgcagatggtgctggccgagaagggcgacccccatcagcagcgcagaaaacgacgtgcggaattcggcctccggagtcacgctcatctg

SEQ ID NO: 195535 - DNA, 228 bp, Arabidopsis thaliana landsberg
atgccaaacagaattaagaaggaaaacagtgtacctcatctgcagcatcccgaagcaccgagagtgcagggagctcacggtgagaaccctctacaaatagaacaatcaaatcaatcatcagcatcatccaggaatcgaaaagtcactgtaagcaaaaaaggaaaggtccccaaagattcttaccatgacgaagatcgattaatttacgtgggataccgattgctctag

SEQ ID NO: 195536 - DNA, 336 bp, Arabidopsis thaliana landsberg
atggcaacgcctcagcataaacccaccgcccagcccggcgcgcccccccgcccgctggcccccaagtccggcccggccgagaccgcccatgccggcgagaaagtcgagcgcctcgaggccagcgaacttgacgacatgacccatgcctaattccgcctgctgtataacgaggcgtcgcgcaacatcctgttcgccaagcgccagcaatggcacatgctggaatatttcaccgtgctggccctggccctggaggcgctgggcgtcgccctgcccttcgcgaccgacgtagcgcatttcgtcacaggcttcagcaccttagtcgccttcatcaccctg

SEQ ID NO: 195537 - DNA, 288 bp, Arabidopsis thaliana landsberg
atgtcctatcatcatctcatgcagccacacttctcacaagtacttttagacctcgcgttagcgggtgcatcatccgccgcatacgccgcgcctttaactatcgtcaaaaacggccagtccaagtgccaccatcgttctgcaggtcaatgcgccaaacctcatgcagcaagctgccagggatttgcaacgtagcctgcagaaaatcagcggtgtgcgatagccattaaaaaccgacggtatggtcgtttccggcatcacgctcaatatcggaaaaacgaccaccgctaa

SEQ ID NO: 195538 - DNA, 164 bp, Arabidopsis thaliana landsberg
acacatatctctcccgatgttcagtcaacattgctccagcaagtaatgaaccttacgccagaacagttgagattactgactccagagcaacaacaagaggtcttaaagctgcaacaagccctcaagcaagaccacatgatgcagccttcatagcattgaggtag

SEQ ID NO: 195539 - DNA, 74 bp, Arabidopsis thaliana landsberg
atgggccagaaaacagtcaacaaagaaaggattggaccatctgccacaggaacagatgacagagacgttgcaag

SEQ ID NO: 195540 - DNA, 355 bp, Arabidopsis thaliana landsberg
atggagtgccactggcgggtgtatgcctgggatctgtctgttcgcggtgcgcatttggacgaaagccacgccttcttcaacggcaccagcctgtttctggtgccggaaggcatggaacaacagccaatcgagttgcaggtgaaacgcaggcacgggcgtgccacagacaacccttcattcgcttcggcggactggcaggtggcttgcggtttgcagcgcgcagacgacgaaccagcaagcattggtttgctaaaggctggcggcgaaattgcattcaaggcggacaactacgacgctttgattgaccacccctttgaagccgggcagttgcaaaccggtttttttgaagcgcgcg

SEQ ID NO: 195541 - DNA, 307 bp, Arabidopsis thaliana landsberg
atggaggacacctgcatgctcgcactcatgctggccgcggcgacggccaccacggcccagaccgtgcccacccagtacgaggccggccatttatacgccacgccgcaaactaccggcgggcagtcgctgcacctgctggtcgacaccggtggtggcggtgcggccggcatgtactggatcgccgccggcaccgccagccgcttgcatctgaaggcgcggccgtgcgccgaagacgcctcaaacaagaaagcgccggcgccgtcgttcaggccgggcgctggactgcctgtcccgcagggcgcctgcg

SEQ ID NO: 195542 - DNA, 157 bp, Arabidopsis thaliana landsberg
gtttatgcatccgagggctcaagttggatcattgatagcgggtgcacaaaccacatgacaggggagaaaagaatgttctcctcctacgagaaaaactatgatccccaaagagctatcacattcagggatggaaatcaaggtttggtcaaaggacttg

SEQ ID NO: 195543 - DNA, 522 bp, Arabidopsis thaliana landsberg
atgggcgatcagaccgcatgctacgtcgacgccggcgacctttactgcgcgggccgcatctacaccgagacctacggctccaccttcacgtcgaccgggctgtccggtgtcacccaggcgttgatctcggcgacgaccaacatcgaggagggcaacaccgcctgcgcggccgtggacggcgtccccacctgcctcggctactggaactactcggggcagctcggcaacggcacgaccgactccgacgaggtgtggacggcgtgggccgccgacgtcgcgggcatcgccgagatcgcgacgggcaccagcgactcctactgcggcctcgacgcggacggcgccgcgtggtgcaccggctacggcattggcaccaccccggagatcaccgacgccggcccgcgcgagagcgtgtcgatcgacaccttcggcgccgtctcctacgacgacgccaccacgtggcgcgcctcccaggggcgcgcggagtgcgaggtccaatcgagcggcctcgtgtgcgggcgcgcg

SEQ ID NO: 195544 - DNA, 21 bp, Arabidopsis thaliana landsberg
atgattgtggatgaacaaaag

SEQ ID NO: 195545 - DNA, 76 bp, Arabidopsis thaliana landsberg
atgaagacacaatgtttgaagaagcttgtggttgaagagaatcagatcacagaagctatattgaaattggcttcga

SEQ ID NO: 195546 - DNA, 313 bp, Arabidopsis thaliana landsberg
atggagccaacacttcaactcaagagaaacatgtcctggaatcccatcaacggttcttcttacaatggctctgtggtattgaggtgggccatgaggagcattcaagtatttgaaactaatgtagaagattgcattcccagccatcaacttttcatttgactccacagcttcacgagtctctacaatgaccttcattatctgcagcggcacagactcgagcctcatgtctccttcccacatcgagtataatgcgatttcagtgtatagattaagccagttgtgttctcggatctctgattcttgcacctcataa

SEQ ID NO: 195547 - DNA, 150 bp, Arabidopsis thaliana landsberg
atgcatgctacactagggttggtggatgttactcatgagctagagcgccattcttggactcgggtcacagacaatacagattgtgcgcttaaaagatcaggcggtattgacagtctctatgtgcctgaaccgccggctgaactattatat

SEQ ID NO: 195548 - DNA, 420 bp, Arabidopsis thaliana landsberg
atatacctcgaagcagagtattatctccaagggtattggattggtgtatttggggatttcgccaacgtgacggaacggtatcttgagatggaacgagaagacgacacgttgcgtaggcgtcacgcggagaaagtgagcgaacgatacggtgcgtttagagaagagcggtttttgaaaggcgagtttggtgggagaggaagtcgcagacgcgcgtttataacgcattttacgggatgtcaaccatgtagcggtgatcataatccgagttacgatggtgacacgtgttggaatgagatgatcagagcccttaattttgctgataatcaggtgatgcgcgtgtatggttacgttcattctgatttgagtaagacttctccgcttcaacctctgccgttcgattatcctaatgaagcttggtga

SEQ ID NO: 195549 - DNA, 380 bp, Arabidopsis thaliana landsberg
atggccagccacgaccgcccgtcagccacggcccgcagccacaacccgaagccaagtagcccccagcgccagacacctgcactggtcacggccgccgtcggtgccgctcgttgccgttgcccagcttccagccgcccccatgcacatcacacacctctcgttgcacgaccaccgaatccagctgggggaacgccagatctggtggccctatcctccaccgccagcccgtcggcaccgacgaggaggcctcctagaggaccaggcagtcgcgtccgccccaatccaccggagaagagaagggagggccccgccaccgccttccccgcgggccgcatgagctgtcggcagcctgcccgggcgacggcgcggcgggaggagag

SEQ ID NO: 195550 - DNA, 72 bp, Arabidopsis thaliana landsberg
atgcaccgaatgcccatcacatatcacaggtctctccaatgcaaagtggtctcactttgtcgaaatcataag

SEQ ID NO: 195551 - DNA, 420 bp, Arabidopsis thaliana landsberg
  unsure (1)..(420): unsure at all n locations
atgacgggcgttgcttgccttgcatcgtgggaattcatggaaatgctgttctcgaacgcggaaataaaggcggcctataacgctgctatggccgcttggcagaactttattgcgctcaacccgacgctgtccgatcgtcgtttctcattcacgattcaggacattacctttgtcgagtacgacgcaannnnnnnnnnnnnnnnnnnnnnnnnnnnnnnnnnnnnnnnnnnnnnnnnnnnnnnnnnnnnnnnnnnntttttcccgctcgggacgcaaaactcggcatttacctacgtcgcaccaggcgatttcgccgaggcggcaaatataccgggccagctgttctatgcgaaggaaaaggcggacgagtggaatcgcggccgggatattcttacgcagtcgaaccgtgtgccgatttgg

SEQ ID NO: 195552 - DNA, 165 bp, Arabidopsis thaliana landsberg
gttctcaaactacttctcagcttcactgtcgacggaaaaactgttgtgatccatggagatatattcgtgagggtaattggagtagaacctccattaccagtagaacacgaagaacccaaagctctcatctgcattttcacaaaacttggttaccaagccagatag

SEQ ID NO: 195553 - DNA, 90 bp, Arabidopsis thaliana landsberg
catccaccagttcgacaaaagacggaacgacgatagaaagacaagaaacgaattgaatatagaagcgacggttaacaaccagctcgaagt

SEQ ID NO: 195554 - DNA, 220 bp, Arabidopsis thaliana landsberg
atgaaactactgcgttttttactcttttggctgagcctgatctttgtgcccggttccctctttgcacaaaaaacctcggtcagtaataccggtagcttcgcttttggacagggcaaaaatctctccctggaccacccctgggaattttactggaacaacctctatactcctgccgacttcaacatcaactcacccgtccctgatttattgaccaaaccag

SEQ ID NO: 195555 - DNA, 658 bp, Arabidopsis thaliana landsberg
gtcggatcagctgatcatcacatccattattacgatctaagaaacataagccaaccacttcatgtcttcagtggacacaagaaagcagtttcctatgttaaatttttggccaacaatgagctcgcttctgcgtccacagatagcacactacgcttatgggatgtcaaagacaacttgccagttagattactgcccgagccaatcttgcagattcagtcaaaaagaaaaacttgtcttgactatgttgctcaattttacttttcaggttcgaacattcagaggacatactaacgagaagaactttgtgggtctcacagtgaacagcgagtatcttgcctgtggaagcgagacaaacgaagtatatgtatatcacaaggttcacaaatccgaaacctctgctctcaactttagcatttttcattcatgattcacagattttcaacctgtcgttgctcaagtattttaaaatgtgaatgatgcgatgcaggaaatcactagacccgtgacatcgcacagatttggatcgccagacatggacgatgcagaggaagaggcaggttcctactttattagtgcggattgctggaagagtgatagtcccacgatgttgactgcgaatagtcaaggaaccatcaaagttctggtactcgctgcgtga

SEQ ID NO: 195556 - DNA, 309 bp, Arabidopsis thaliana landsberg
atgaccggtgttcaatctgttctaaatgacttttctgtcatcaacaatgggaaggtcacttttggagatggtggcaaaggaagccttcacggtacagggaagactgagatatatgatcaaccgcatctgtcaaatgtgtactttgttgcgggactcactgctaatttaataagcataagtcaactgtgtgatgatgacttaactgttacgtttacaaagactggatgtgctgcactcgatattgctggcaacaatgttctatcaggagatggttcaggctacaactgctacatgtggaaagactctgaa

SEQ ID NO: 195557 - DNA, 24 bp, Arabidopsis thaliana landsberg
atgccgacgccgcagctccactgg

SEQ ID NO: 195558 - DNA, 147 bp, Arabidopsis thaliana landsberg
atggccagtccccgagatcacaacaacgatgtcctaggtattaacacaaggctgactaactcggcgaccgatgaggatgagaaattagaagaccacatgacaaggttggacgaggaattccagcgactactcgctcgaatatgccag

SEQ ID NO: 195559 - DNA, 153 bp, Arabidopsis thaliana landsberg
gtgttcgccgcggcccagcctgtcggctgcctgctgttcgtggtcggcggcggtgttccgtcgtccgtgggccgccccctggccttctctttcgtcccgcgccgcgctttcgcgcctgtgttgggcgcggcgcgcctgccctcggtgctgtcg

SEQ ID NO: 195560 - DNA, 81 bp, Arabidopsis thaliana landsberg
gggttgggacaagatggtcgaacagcatgtgaagatgcattcggtgatctcttcttgaatctgaagaatacagagcattaa

SEQ ID NO: 195561 - DNA, 194 bp, Arabidopsis thaliana landsberg
gatatatcgcgtggaggacggtgaattctacgccggaactattctcagacgagttattacaagccgaagccaaggaaaaacaaggactcgatttcaagagaaagatggataatgggttatggacgttcgttgatatggctagcggaagatacctttggagaaatctcaaggagatgcgtcagagaagtcaatga

SEQ ID NO: 195562 - DNA, 37 bp, Arabidopsis thaliana landsberg
atggctttaagagatgaatcaaagatggatgtaaaag

SEQ ID NO: 195563 - DNA, 113 bp, Arabidopsis thaliana landsberg
atgaggtcctccaccagcaaatccaaatagaagtcaccgcttggcggtaccaggcgggctatggccttcgaagacgacgacgacccatttgtctccgccaaatcatccgctga

SEQ ID NO: 195564 - DNA, 207 bp, Arabidopsis thaliana landsberg
ttttctcgtaatcgaaatattgtaaattatgatgcattcaaaaagatgataaaatttataaaacatatgtatgtacctaaatattctgcacgacgaaccaaagcgaatgatagtgctgccgcgttccctcccgttgaacggttcgtgtttctcttgtatgatttgatcatctttctctcaagtgatgatggaacaaacttctcgtaa

SEQ ID NO: 195565 - DNA, 63 bp, Arabidopsis thaliana landsberg
atggatgaaagagtccctgatgccaacgatagcgaggtggaccacgtggttgaaccagagatg

SEQ ID NO: 195566 - DNA, 749 bp, Arabidopsis thaliana landsberg
  unsure (1)..(749): unsure at all n locations
cctctaaggcgggatctgggcacttaagttggaataattcgggcagttccgccacagagacgagaccggaactgtggctcgcggactaccgtctggcctgccaactgggtggaacggacgatgacaacctcatcatccgcaacctccccctgttcctctccgacacccgtcgcgcctggttggagcacctgcctccggggcagatctccagctgggatgatttggtccanagtttcgccggcaatttccagcgcacgtacgtgcgccccgggaattcctgggacctccgaagctgtcggcaacagccgggagagtctctccgggactacatccggcgattctcgaagcagcgcactgagctgcccaacatcaccgactcggatgtcatcggcgcgttccttgccggcaccacctaccgcgacctggtgagtaagttgtgtcgcaagacccccaccagggcgagcaagctgatggacatcgccaccaagttcgcctttggccaggaggcggtcgaggctatctaccggaaggacaagcagccccagggccacccaccggaagatgcccccgaggcgtcaactcagcgcggcgccaagggagaagggcaagaagaagtcgcaagcgaaacgcgatgcgccgacgcggaccttgtcgccgccgccgagtacaagaaccctcggaaaccccccggatgtgccaatctcttcgacaagatgctcaaggagccgtgcccctatcaccaggggccc

SEQ ID NO: 195567 - DNA, 444 bp, Arabidopsis thaliana landsberg
atgccggaaaattacttcggcgaagaagttccagcgaatctgaggatcataaaatgtcatcaggatgaagttttggagcttccggaaaatgcaaaactgttagcatattcaagcatgtacgaggtagagatgtattcaatcaaagataacttcctttgcattcagggacatcctgagtataaccgtgacatcttgttcgatatcattgatcgtgttcttgccggaggccacattaaggtttttttctaactctccctttgtagaatatccatttatttataatttgtatcctaaaacaattgctacttacctaattaacttaatgtgcagcaaaactttgccgaaacgtcaaaggcaacaatggaaaagaatgaagcagacaggaagttttggcagaaaatttgcaaaaacttcctcaaacgtcaaccctccttattagtttga

SEQ ID NO: 195568 - DNA, 74 bp, Arabidopsis thaliana landsberg
atgcgacagcgcgaatgtgttgcagtcttgtcgctcattttcttgatgtccatcgagctggtgacgctggttcg

SEQ ID NO: 195569 - DNA, 116 bp, Arabidopsis thaliana landsberg
ctattcttcttccttgtggtcttctcccagaccgcatttggatatcagaaccacccaatccgaattttgagattcccgccttactcctctgggagattgttgcttcaaacaattga

SEQ ID NO: 195570 - DNA, 493 bp, Arabidopsis thaliana landsberg
atgagtcaactcggagatttgcttagagaatcagaagatggaacaagaagtgagaggacgatgatgatgagtttgctcgaagaagatcaaatcaacggtggagatagaacgatgagcaaatggactacgttaaagcaacggctgacatttgattgggttggttgttgtggtaagcctcttactctgcgtctcagacaagcggagacaccaatcgtcgtcgatgatgatgacgacgaagaagaaagtcaaaaccaggttgttgacttttcggatccggcttcgggtacggggttggattgtttgacacgtggctcaacgaggaaccttgcagaggctttagcggaggagagattagcacacgtgacggaggaggagacttcagttactaaagtaccgttgatgaggttgcttgcggaatcggacggttgtgattcgacgacgacgtggttgggtaatgatccgctgtgttgtgtgtgtatgggaagagagaaag

SEQ ID NO: 195571 - DNA, 579 bp, Arabidopsis thaliana landsberg
atgacatcgcaactggaagatacgatcgagaagttaaagaaaggtacgcgaatatttgtttaatctgttattcctagtttctaaaaatattaaaactctgattctgttcaattttccgttttagtggtgaggagtttggaagagataaatagaaattcaaccatggcctcactcacatataagctttaccgttttatactggagaaagaagatgaggctgccgccgaactcaacgctgtggacacagactctatcgagacaaaggttgtgaaaagtctaaaatttattgtcgacatattattgattgagacaacagtttaactttaaactgtctggtgcagctggtgaaactagaaaacaaacagagatatatccgtgtagttgaagacaacccgatcgacatccgtagtttgtacaggcctaaacttgttaagcttttaaaggagagagggtttacactattcccatctgaagataagcctctctcagactatgactacctagaagctgcttcacatatgggtattacctattcaaaaaaacgagaagctatgcgctcaaaaaaatgtgttgcaagac

SEQ ID NO: 195572 - DNA, 494 bp, Arabidopsis thaliana landsberg
atgaaacacaccgaaactgacgagaaggaaatccaactaaatccaaaagagacacaacagaactcaagtagaagattgctgacaattttctgaaaaagtgaaacccaattccggactgaaaacgatgatatctccggtcaaagatctgctcagatagaagatacctgagagataagttctgaatcccaaagaattgggacggctttggttatagtcggtaagaactcaatcgtagaaaatcaccagctaggagagagaacagagcgaaagatctaatttttggtctccagaacggattagtatttgtatatgttcatatttctcttttgtgccatctttttaataatttaatcttcatacagaagataatctccaacaaattccatcgtcgtcgttaatcaaatcgctgtcccaggtttcttttgggcttaaggacttttctctcaggttgtttcaaccgttcggagctcctaccggagatttcaacgtacttg

SEQ ID NO: 195573 - DNA, 469 bp, Arabidopsis thaliana landsberg
  unsure (1)..(469): unsure at all n locations
atgactattaatgaaaataaaacagtctgctggggcaaatttccatatcttcgaactctaaaccgtcatagacttttctgggccacaactggtgtcggtcgataccaaaaggctgccgatcgacactctcgacttgatctgaaagtgaattcgtcctttggcttgctttcttcagctnttgcttcaaaatgtctcctcatcttcattgttgtccctctccatagaatacctgaaagaactataaaagactttagaaataacaaaaagacttaaaatcctacatctaaaacatagttttaaaacggtaaaaagagggttatatcacacaccactcgatcatcacacgacctgccactcgatcacaacactcgaccctgaggtcgagtatcggcagtcacaacccagcatcaccactcgaccatgcactcgatcgcagcttcagagtcttctcaaactgcactcaacatga

SEQ ID NO: 195574 - DNA, 450 bp, Arabidopsis thaliana landsberg
atgcgcatagaacgttacacaccgccccgtgtgtgggtttaaatttgcggggtgggtatgcattttatttttattcctgtctacattacatcccaacagctgggctttagatgaccttgccccgcccaatgtcaaaacaggacttgggcgtgatcaagcagttctagagccaggacaaagccagtttgttcaaaattttagaaagaaatacttcctaaatagcgatggcagctatagctccgaaaaattaactgaatttcttctccgattagaatcagaacagaagcaactcgttcaagacctggaagaatctcaagctatcgaagactttgaaatgcgcacgcagcgcccagatcgagcgttcgggcaaccgatttcaagaagcgatcagaaaatcgtcaatgtctattcccattatcttattccaattattaaggaacttaccttcaa

SEQ ID NO: 195575 - DNA, 68 bp, Arabidopsis thaliana landsberg
atttgtcatttgttattcgtctgaatacggcaggtcctatctacacatgtaacaataatgtcgtttaa

SEQ ID NO: 195576 - DNA, 703 bp, Arabidopsis thaliana landsberg
gtgaaattcagtgtgagcaaccaaacaattctctgtacacttttactgggaaccttgtagtccaaaagcagacgttacctctctctccggaccagcttttattgcgtgtatgattgactatttctgctgttggctgttttttcttttctgtcttgtgtttttttgcaatttcatggttttctttgtcttagataatggtgatcagcttatgagatatcttgtattttttggcaacttttatatcctcggattttaacagtattttgagcagatttccatgcatgttgtgcagagccttttatatccttagatttaataatattctgagacgtttgatatctgtattatcagggatgcagtcttaggaacacagaatacatagttggagctgtagtttttactggtcatgagacgaaggtaagctgtcatgaagcttgttttatgggaaactagctttgcaaacgtgcgtttttagcttacaggattcatttattttaacccttctatgctttctacttcgttatatagttactatacacataggatctgaagctattctatggttaattctacatatgtaggtgatgatgaatgccatgaatgctccttccaaaagaagtacgctggaaaagaagcttgacaaactcattattacaatcttttgtgtccttgtcacgatgtgtctgattggagctataggctg

SEQ ID NO: 195577 - DNA, 319 bp, Arabidopsis thaliana landsberg
ccttcgtcacagccgccaacacagcctccgtcacagccaccaacgaagcctccaacacagcctccgtcacagccaccaacacagcctccaacaccgccaccatcacagtctccatcgcagccttctccactaccaccaaacatcgcttgtaaatccactccttacccaaagctctgtcgcacgatcctctccgccgttaaatcatcaccttccgatccttaccattacggaaagttcacaatgaagcaatgcctcaaacaagctcgtcgcctctccaaagtcatcaaccgctttgcccagcgcgtggaagctgatccag

SEQ ID NO: 195578 - DNA, 1429 bp, Arabidopsis thaliana landsberg
atgaaaatagagctagtattcattccctctccggcaattagtcatctcatggcgacggtagagatggcggagcaactagttgataaaaacgacaacctctctatcaccgtaatcatcatatcttttagttctaaaaatacatccatgatcacctctcttacatccaacaaccgcctccgttacgaaataatctccggaggagatcaacaaccaacggagctaaaagcaactgattcccacatccaatttctattgccactggtgagagacgcggttgctgaacgcgtagattccactctaccagacgcgcctcgtcttgcgggattcgttgttgacatgtactgcacgtcgatgatcgatgtcgctaacgaatttggcgtccctagttacttgttttacacctctaacgctggatttcttggacttttgcttcacattcagttcatgtacgatgcagaggatatctatgacatgagcgaattagaagactctgacgtagagttggtggttccgagtttgactagtccttatccggtgaaatgtcttccttacattttcaaatcaaaagagtggcttcctatgtatctaaatcaaggtagaagattcagagagatgaaaggtattttggtaaatacttttgctgagcttgaaccttatgtgttggagtctcttcactctagtgacgatactcctcaagcttatccagtgggaccattgttgcatctcgagaaccatgttgacggttctaaagacgagaagggttcggaggttttacggtggctcaatgagcaaccacctaaatctgttgtgtttctttgctttggaagtatgggaggtttcaatgaggaacaaactagagagatagctgtatcgttagatcgaagtggtcaccggtttctctggtctcttcgccgtgcatctccgagatatagataaggaacttcccggagaattcaagaatcttgaagaaattctcccggaaggattctttgatcggacaaaggataaaggaaaggtgatcggatgggctccacaagtagccgtgctggctaagccagcaatcggaggttttgttactcattgcgggtggaactcgatactcgagagtctttggttcggtgttcctatagcgccatggccgttatacgctgagcagaagttcaatgctttcgtgatggtggaggagcttggtttggcagtgaagataagaaagtattggcgaggcgatcagttggtgggaacggcgacggtcatagtgacggcagaggagatagagagaggaatcagatgtttgatggagcaagatagtgacgtgaggaatagagtgaaggagatgagtaagaaatgtcacatggctttaaaggatggtggctcatctcaatctgctttgaaattatttattcaagacgttacgaagtatattgcttga

SEQ ID NO: 195579 - DNA, 111 bp, Arabidopsis thaliana landsberg
atgcagctgaaaaacccaaagatggatgttacgctggagacgaccaaagaccgtccagacacgaggccgaaagtcctgcccatcgattcgatttgtagtacaagactaaac

SEQ ID NO: 195580 - DNA, 325 bp, Arabidopsis thaliana landsberg
agattgcagtcaacagattacttgttggtccggtctcctaaaggaaagctctctctaaggcgtattgacaagatagttgttgttggacaacaggtttgcctttcgcaagatttctctcttagaattttggtccagggaatgtccaactacatatatatacccccagacacacacacatacataattaagattgaatctatatattccatgcttgtgaatttagtagcgtaacaatgggcttactagcctgagcgaatcaaactaatcttttccgttatcatttttcctttagtattttgacgttggtgtcctagcaaaattttag

SEQ ID NO: 195581 - DNA, 362 bp, Arabidopsis thaliana landsberg
gattacaaggaatagcattaacgtcgatacaagatgtgaatggaatggatgtacatggtaacagaaatattgctacagaagcaataagatactttactgaacttttctctaccaattcccctactacaatatccaaagctctgcgtaacatacatccagtggttactcctacaatgaatgatcaattactgaaggatgtgtctgaagatgagatacgagatgcgctattctccattggaggttcacgggcacctggaccggatgggtttaatgcggtttattaccaaacctattgggatattgtgggctcatccattgttgctgaagtcaaaacgttcttcaatactggaacaatggataag

SEQ ID NO: 195582 - DNA, 321 bp, Arabidopsis thaliana landsberg
atggccacgtgcattgtaaacagccatgcccaagcacccaaaatagaactgagcgaagcctttgaggaacccgatgatggctggaataaattgctacaagtaaagaacggcaataccctgttcttccatttctccaaagaaggcattgctgtagtggtgtatgataaaaacaggaaagcgatatcagaaaaaaccatcaccagcgaactgtgggaagcgcggaagctaagaggatcgaccataaatggcctgtacgaaataaacggcgaagccgtacttttcctgacgcaaatagtagaacgcagcgtaacactgtaccgc

SEQ ID NO: 195583 - DNA, 244 bp, Arabidopsis thaliana landsberg
caacaagttcaagagtttctcctatctttatgatgaagagcagtttatagcctttcttaaaaatgatgttatagttatgaagaccctccctgagagcttgaaagccgcaagaaaaaggaatgagttccctctttttaagcccaaaaactctgcgtcaccaaaattttacctcgaggatgtgttgccaaagttaaagaaagctaatgttattggattgatcgtctctgatgggggatgcttgcag

SEQ ID NO: 195584 - DNA, 253 bp, Arabidopsis thaliana landsberg
gagattcgtcaaagccttagagaatgtaaggaaattcaacccaagagagcctcggttcttgcctccgaacccagaagttgaaacggacaaggtgaatcttaggcatcaagaaacccaaaacaagaaaaatggcgatgaatggatggtcgataacgcacttcaaggagtggtttcgaagctaacaccagctcgcaaacttaaagttcagttattggtgcaagcgtttgagtcactttcggctacagggaactga

SEQ ID NO: 195585 - DNA, 253 bp, Arabidopsis thaliana landsberg
tatgtactgcaaatgtggagaacttgatgatgcttggaaactctttgaggcgatgaagaagaaagatgttgtggcgtggaatgcgatgatttccgggtatgctcagcacggtaatgcggagaaggctttatgtttgttccgtgagatgagagataataagatcaggccggattggataacgtttgttgcggttttactggcctgtaaccatgctggactagtggatattggaatggcgtatttcgattcgatg

SEQ ID NO: 195586 - DNA, 112 bp, Arabidopsis thaliana landsberg
atgcttgccatttttgtggttttcttggactccacaaaagtagaagccacgaggatgttaagaatcaccttcgatagtgatatccggttcgtgttcgagtccttgcagaagg

SEQ ID NO: 195587 - DNA, 355 bp, Arabidopsis thaliana landsberg
gtcccttgtgcagtccttacctccctcacagtttcaagagaaaggagttaactaacatttgtcagctcaatgctgcttccaagggtacttttgtgctcaacaaagatcttgataccattgaccgtcttgtctcccgtttgcacactggaattgaatacgacaagtttttaattcgacttggattagagagggggagggacgtgcattcaattcaagagattctgaaactgcttcgcaagagccacctccccctcacccatcaactcaaggatcttgaggatcatatttgcctttggttcactaacgttaacaaagctagatcgttgctcctaacagagattcatcttcctcgacc

SEQ ID NO: 195588 - DNA, 447 bp, Arabidopsis thaliana landsberg
atgtcagtcggcgttccagtgaatccgtcaagcagcagccaactaccggcggcgccaacaacaacaacaagacggcgcgtggctgattctcaagaagatcattcccacgtcaacaccgtcggaggaggaaacgcagtcgtttacgtccccgacgaggaagaaaccgctacgagctgctgcggcggaggaggaggaggaggatcattatcgtgttgtccaagtggctcccaccacaattacctcgtcgggttcctctctctccgaaaattcaggctcgtgtggatgctaatggttgagaacaaatctaaatggacggctgggattgctcgtaacatgagatccacgaccaatcttggccgttttattctaacgttattgagtatcctcgtcgtcacttttttcctaatcgttgctctctccggcggcgttggaagacggagaaaacac

SEQ ID NO: 195589 - DNA, 153 bp, Arabidopsis thaliana landsberg
gtgtccaacgtcgacaaatatgaaccgaagcaggatccaggaggctggctgaccgtctacaccaccgctgctcgagctgccggggcgtctgaggacgtgatgaccgcatacttacccattgtcctcgggcaagacgcgctgcaatggctgtga

SEQ ID NO: 195590 - DNA, 180 bp, Arabidopsis thaliana landsberg
atgcgcctatcgcggcgcaaccggggaagcaccgaaagtccgggatggaaccatggcccgggtcgcggccgccaaaccccagatcacgccgagctggaggaagaagctgcgccagtggtcggtgtcgatgatgaagccttcgagcacgacgccgaggaagctgccgaccgcgacaatggc

SEQ ID NO: 195591 - DNA, 441 bp, Arabidopsis thaliana landsberg
acaaccagtttcctccaccagccattttgccacctatgacaccatcacaatagaaaaggtaagttataggttgcaaaaaacaaaagaaaaggtgtacgcaaaagctagccaatggtaacataatttactcatacagaacataaagttttaagatttggatggtagccatcatcatgtcaactaacctgatgaatttatttcttgtccaataggaacatctagataagagcctaataggaaagcattatcagtattaatcagcttctcgtccaatatgtctcgctcgtgtttttcttcccaagtaaagttcattagtttatcctctgacttgatttttacatgtggcagtctaggtaaatcttccctcggagcatcatgagccagcgaaaatgctaagctgcttggaatcttatgttcataaccagactgtgacttcccaag

SEQ ID NO: 195592 - DNA, 220 bp, Arabidopsis thaliana landsberg
atgatgatgaacaaagttgttttgggttcgtttctgtttttcatgttggtgagttcgaattttgtggtggaggctcgtcctttgggtttaacgaaggctgaagagaacctcgtggctaagttcttcgatggtttgtcacttggggcgattaaggagtcgggtcctagctctggtggtgagggtcatcggttcgtggaccggactgagacgcttgaatatg

SEQ ID NO: 195593 - DNA, 415 bp, Arabidopsis thaliana landsberg
tgaaaaacaggtagagttggtggaagaatggctgaaaggagaaatgcaaattcctgaaataaaagacaagtggcataatggcctgaacattcctattcaattaggtatccccgattctattagtgccgggcaaaatgttgggatagacattaccgttacaaacaataaatcagggcacaattttcctaccgggccgctagatttaatacaggcatggattaaattaacagtaaaagatggttatggtaatgtaatttattcttcaggagttctggataaagattacttcattccttctggagcctttatatatcgttctcagccggttgatcagtatggtaacgacatagacaggcacaatctatgggaactggttggtataaaatcaagccggtcactttacccgggtttatag

SEQ ID NO: 195594 - DNA, 572 bp, Arabidopsis thaliana landsberg
atgtccgaggtcgtctcggacttttatcgtgtcctcggctccggcgacgtcccttcaggaagctcccctcagagccgccttcgagccttgggtgatcacgcgcgcggcagagtccgcaacgctacaccacggcgtcaggcgggccttcgccgtgcttgcttcccactacgttgtggacctggagcgggttagtgaggggtactgtcttcctaacgaagacgatgctgccctagcggaggtccaacggctcgacgcggtcaccgcgggtcagggcgcggtgttggcgaccacctttgaggcggaggtccttcctcctgcgacgtcaccggaggccgagatggaccccaccgatggcggggatggagctgaaggcgcggctccttcccaaggcggtgcctgattctcgtttgaacagtttcttgttgaatgtgtgtctcaccacgaccgctgaggcctgaacacttttgtctttcttgcatggagtcgtactctcctttctttccatctgcatgttcgtcctagctcgtcaataatagggtgggcttctcgagttgggccattcttcgtggcag

SEQ ID NO: 195595 - DNA, 1904 bp, Arabidopsis thaliana landsberg
  unsure (1)..(1904): unsure at all n locations
atgaaacacgcaacagagaatggcaacgaaaggtagcttcccgaagcaaactacaaaaacatgcaaatgcattaagactccagttttattaagttttaaagggtccgatatgctgccttcaaacccaacaccaaacacacacactctcgtgatctcccacgttacaaccacaaaggtatgcaaccggagcatcactaccaaacgctacaccgttgtgtagacactcggccagggtagctagccccatctctccgagttcttcgcacttcatggcgatcaagtaactttgttacaagaccccacgatagcacggttcactatgaaggtcagacatatcatgatcttggcacgcttatggtctttgcctcctccacaagcaccacgtaccaagaccccaaagtttaagatattatgaaacacatggttaaatcaaacacatagactcatcaatatcccaacacaacttcccaaccataaacaatagcataagaatcgaaagatcacatatgcaatctaatataaccattcacatgattcatataactcacaatcaatcaagaatacatgagaatatgaatatgaaacttaaacaattatccagaactcactcagtaaccaacaaaaagttttcaacgattcgggcaaagctttcggctatgggaccttaacttgaatcggacggacggtttcaactcggtagcctctcacttccactcactttctcttcacaaaacaatcggggtcctgttcagcttatataggcaagggaaaagggcgagtctgcaggtccacatgtcaagtgcttgggtgagtcagcgatccacgtgtcatccgctagtgatgacacactcgctgctctagcggatgagctacacgtggccacccaaacttcggttccacacaactaaaattcggctccaagcaactttgcttgggccccatgtgagccgagccacgcgtccttggggccggggacggtcggtcgacgccctgtggggcaaacttcgcccgcggcacgcccgatcttgcccaaactagcccattcgtgcccattcttgcccaaacttgcccatctttttcctttgatagtgtattgtgttttgggcacatgaggtcaattggccatgcattcaggcaactttctaaaatttggactcttgcctgtggccgatgtccttacgcgggtcactacattctcccccccccttaatagaattcgtcccaaattctagaaggattagacggtccggcttcatcctcnnnnnnnnnnnnnnnnnnnnnnnntggatattttgtccgaggaacttttcctcatttgcccaagtaataaccttacgattttgccttccccagaacacttgaatttgtagaatccttctattctttatctccgcattcttctttcaccagtaccaagagggatttcgggaaaggtgagattcgttttcaactcttgtatcggctcgggtatgatagcattaggatccggaacgtgcttccttagttgcgacacatgaaaaactttatgtaatcgcatttcttctggcataaacaaacggtaggctacctccccgattctgttctcaattttgtatggaccaataaatcttactacgagccttacaacttttccaaaacgatctttccctttaaacgcagttaccttaagataaaccatgttgccttcttgaaattacacttcacgcctctttcggtcagcatactttctctgtcgatcttgagctttcttgataatgtctcggatgaactgaattgactccgcaatctcattgatcaaccgattattaaaactcatcctctatcctacttcagtccaacaaagaggagatcgacatggccttccatacattgcatcaaatggcgacataccgatgctcgagtga

SEQ ID NO: 195596 - DNA, 168 bp, Arabidopsis thaliana landsberg
atatcgtcggttaaggccgatgaagacgaagaagagatgttcacacttcgtttcatggctaaaaggttaaccgaacttaaaaaggctttgaaggaaaagaccggtccaatcaaccaactggacttgcagagtttggaaagtggtggtggtgtagatgatcccactttg

SEQ ID NO: 195597 - DNA, 579 bp, Arabidopsis thaliana landsberg
atggatcccaattcatccaattcatcgggatctggcttaccagttcagatcccaaatgatgacgttacggacgggcacctcccaacggatctccctcctggagcccaggttgatgctatccataacagtgacccgaagaacatctcccaaaactcgaattcttctggatctgaccaaatcactccccctccgcaaacaaggggcggagaacgaaacgtcacgatacagcctccaaacggagataacccggccaacctgtctaatcaggttcgcccgcgacctgcgagtgaattggccgagctccgcgcaatgatcattaacttgatcaacttaaccaaaaaccaagaaattgcgcatcgcaacctcgccacaattgtgggtcagcagagacgctattccacttgcatggcacatgaggtagagcgcgatatcgcgggtaaggaggtttccccccgcaaaactgagattcctgcccaggtccccatagatctgacaggtaccgtctccccggccgatcctactctgagaactcgtctggatttcgcctcgatagacgtctcacctcctatcaaccggcag

SEQ ID NO: 195598 - DNA, 117 bp, Arabidopsis thaliana landsberg
atgggccaaaatcccctcgacctggcccatttaccatctcccccaacccgctctacccggcccatgtactcctaccccgcgaccactgctccttcttgcctctcccgtatcgcgcgg

SEQ ID NO: 195599 - DNA, 589 bp, Arabidopsis thaliana landsberg
atgcagggagagagggctagtcttggttctttatcaaaggctttgaactttgagcgcggttctacgtctagtaacgctgtggtagatcagcaaattcgttgggagaatcttcacaattatggtgataatgatttgcaggattacatgagttcagctgctgatacaaatcctacttttgcaaactcagtttatcatgagaaacggggcttgcagaggtttaacattggtgaggctagctctagtgggacgaagaacgaaggggcaagtctcactgaacaatggaagggaattggaaggtttgaggaacagaggaatgataagcttgagttgagccctttgtttgtgcaaccatctaatggaagccgcgtggttcgtgatgtcaatctaaatgcagaatacaatgagcatcttgaggatatgaatccggttacagttcatcctggtcattttgaggttaatggacttaggtctgagtttttactagataacagtgttagagctggttcctctgttgatggacgtcgtgcatcctgtaaaagaaaagctcttgatgcaagcggtggtcagtcctcttcaactggaggtttcc

SEQ ID NO: 195600 - DNA, 893 bp, Arabidopsis thaliana landsberg
atggaagacgacggttattacctcgacactgatctcgatctcagcttcacctccacagccaccgaccgtacattcacctcatcaagcgctagatcgagtctcgcacgctcaagcctaaccttaagcttcaacgacagactctcaaccgcaacaacaccttcaaccaccacttcctccgcggcaacaacactccaccaccgtcgttacgatcctcactggacgtcaatcagagccgcaacaactctctcctccgacggaagactccatctccgtcactttaaactcgtccgacacctcggtacaggaaatctcggccgtgttttcctctgtcacctccgtgattgccctaaccctaccggattcgcacttaaagtaatcgatcgtgatgttcttacggcgaagaagatttcacacgtggaaacagaagctgagatcctctccttgctagaccacccgttcttacctacactctacgcacgtatcgatgcttctcactatacttgcctcctcattgattattgccctaacggtgatttacattccttgctccgtaaacaacctaataaccggttaccgatttccccggttagattcttcgccgccgaagtactcgtcgccttggagtatctccacgcccttggaatcgtttatcgagatctcaaaccggagaatatcttgattcgtgaagatggacatatcatgctctcagatttcgatctctgtttcaaagccgatgtagttccaactttccgatctcgacgattccggagaacttcgtcttctccgaggaagactcgtcgtggtggcggttgtttctccacggaggtagagttcgagagagaagagatagtagcggaattcgcggcggagccagtgacggcgttttcgaaatc

SEQ ID NO: 195601 - DNA, 330 bp, Arabidopsis thaliana landsberg
ccttgatctgtcgcggccgccgtcaaatcgtcagtcgttcaactcgccgattcgcatcttagccggtcgtcgatttcctgttcgccatggtacaacaccgctgttaaatccggtctccaacccgcaatgtcattcgtcgtcctctagtcccagtttgacccatccgtgtgttcgcttttcatccatcaggtttcacgcgtgctcgcgtttgccgtcgagtcgtcaaacccatcatccccgctcgatccccacctcaccagctcgctccagacttcaattgaaggtcgtcgtcgatccgtgcgtcatcaagaaattccaagagataagtga

SEQ ID NO: 195602 - DNA, 525 bp, Arabidopsis thaliana landsberg
gaggtactatctgtgcgagaagctctgaatgctaagaaagaagcggctcaaaaagataagagcttttctgtatctgatacagttggaaatagtgatgatcacgatgatggtgaagatgagactaaatttgatgcaaagatgaggaatcaagtgctcagcagaaggaaggagattggagatacgccttcaaagccgactcagaaaaaaagtaattacgttttccatctctctatatcctgatatcctgaaatattaaacttatggcaattcttgatttgaataatcaaatcttcaatcatattaagcaatcatgtctatgtttagggatgttatctgtttatcaacacgatttgatgcttttaggtttggcaccaagtattgccagaaataatatacagttctctcctcatgcgtgttctttacattatctctagttatgtctgtatattctaattataatatacttgtggttgttttcttaacagagagctctagcctgaaaggccgtgaagagtctacgcaaag

SEQ ID NO: 195603 - DNA, 157 bp, Arabidopsis thaliana landsberg
atgcagagttacgaagaatttatagacctcagcgttggttttccacaagaaggctttgaagttatcgatgatgaattatactttcatgatcttaaccttatggaaatgatcgaaacgtatggcactccattacgcttcacgtacgttccattaataa

SEQ ID NO: 195604 - DNA, 237 bp, Arabidopsis thaliana landsberg
attcttcttgcagagaagattgacagagaaggggggaaaccactcgaaatcaacgttaaaaaactagacaacaaagggttcttttcaaaacaagaatggggttattctaattttattgcaccatgtgtgtatcgctcttccacagaccctctaccagagcaggaacatgagtatcccgcaccagctgcttctgacaaggtcatagattttaacttgtatcaagattttcttgtttag

SEQ ID NO: 195605 - DNA, 196 bp, Arabidopsis thaliana landsberg
atgcgagggtctgtggcgctgggaaaagactcatgcgagttcggagtgacacgacggactcggccatgggcacgacaccggtgcagaggcactagaggtcacggtccgcagcagggtggcccgacggcggcgcacattgaccccggcgagcgattgcgcggacagcagggcagtaaatggggaattaagggcatgg

SEQ ID NO: 195606 - DNA, 417 bp, Arabidopsis thaliana landsberg
aaccctcctactttatatggtggacgcaaaatactgtctcgagcttttcgcaatcggtttgtggagattcatgttgatgaaattccagaagatgaactgagtgaaattcttactacgaagtgtagtattgctaacagtcatgcttcaaaaatggttgaagtgatgaaagacctgcaacgcaataggcagagtagcaaagcttttgctggaaaacatggttatataactccaagagatttattccggtgggcctatcgtttcaggacttatgacggtacatctcatgaagaactcgccagagaagggtattacatccttgcagaaaggctgcgtgatgacactgagaaggtagttgttcaagaggtgctggagagacatttccgtgtcagtcttgccaaagatgatttgtacaatatg

SEQ ID NO: 195607 - DNA, 572 bp, Arabidopsis thaliana landsberg
atgtacgcagagtttttccaagattccgagcaacctgcacggatcacagcaagtaaaacacttcttcatagatctaaagcaactgtaaaagactatatggagaagcaacagtgatatcttgagctatccatagagaatcaaacacaattaagcaaaaagctcatctatctctagcctaatctatacactatactccaattctcctaagatgaaactaaacagtactaattcataagttgcttaaacctataaaagctatgattccaaatcaatgatcaagaaaattgccacacacaaagacactaacctcagcaagacctttaggaccaaagactaacaaagcaacaacaccaataaccaaagcctcaggtgctccaacaccaaacagagacgcacgaatcatcatactcttacatcttctcttcttctctgcacacaaaaaccacccaaacttcagaaattaaacaactttacaaaaaacccagaagtaaagaagcaatcatatctctgaaatcgaaacctgggtttgaagatttcggcgagattgagaagcccaaatgctttaaaccaat

SEQ ID NO: 195608 - DNA, 123 bp, Arabidopsis thaliana landsberg
caatatcgacctgcagatgcgtgtaacgaaggacaaattgtcaaagcttataatcagaaccactcttcaaaggtttaataagtcgaaagggaatcaagaaaagggaaatgaagcagaaccaaa

SEQ ID NO: 195609 - DNA, 110 bp, Arabidopsis thaliana landsberg
agaagcgtaaatcgcacggcccagaggcacctcagataaacggacgaatcagaaaagaggaagccaatatatacggaagcagagaatcattacctttcatcgcaatatga

SEQ ID NO: 195610 - DNA, 122 bp, Arabidopsis thaliana landsberg
atcttcccctcccccatgcagcaaggatcgagaagaggaggagcaagatggattgaagaggaagagaggatcaaggagatgttctacccccatctcttgcagattttcttggggaaacctag

SEQ ID NO: 195611 - DNA, 947 bp, Arabidopsis thaliana landsberg
tcgacagagccgaagtgaccgcagtcactttgccgctccactgaccgacctgacagaaggacaacgccgcctgcgccgcttcgactgctgtgccactcgacagagtgaggctgacaggcagccaggcccggcctcaggcaccgtaggaaactccgcttcgcccgacccagggctcggactcgggctcagccccggaagacggcgaactccgctccgcccgacccagggctcggactcgggctcggccccggaagacaacgaactccgcctcgcccgacccagggctcggactcgggctcagccccggaagacgacgaactccgcctcgcccgaccccagggctcagactcggcctcagccccggaagacgacgaactccgcctcgcctgacccagggctcggactcgggctcggcccggaagacgacgaactccgcctcgcccgacccaaggctcggactcgggctcggccccggaagacgacgaactctgcctcgcccgacccagggctcggactcggcctcggccccggaagacgacgaactccgcctcgcccgacccagggctcagactcgacctcggcctcggaagacagactcgacctccacctcggaggagcctccgcctcgcccgacctagggctcggggcgaccatgtcacagggggagtcatcattaccctgcccctagctcgctcaggctacgggggacaagaccgacgtcccatctggctagccccgataaacaaataatgatggcgccccgcatgctccatgacgacggcagctctcagccccttacggaagcaaggagacgtcagcaaggactcatccgctccgacagctgtccctccacagggctccattgctcctccgacagccacgacatcacaccagcagggtgccaagatctctccggctgccacattggcatgtacttagggcgctag

SEQ ID NO: 195612 - DNA, 85 bp, Arabidopsis thaliana landsberg
atgatcatgacgaagaagaagaagagaaagaagagaggaataaaagaaagacaagttgagagtgtttctggttcgcacgttgttt

SEQ ID NO: 195613 - DNA, 61 bp, Arabidopsis thaliana landsberg
atgatgaaaaagatttctcaaatcggggaaaccatcaattttgattggaggggtataaatg

SEQ ID NO: 195614 - DNA, 492 bp, Arabidopsis thaliana landsberg
caagcacctagacagtggaatgaaaaatttgatcattacatgactgaaattggtttcaagagaagtaactatgatagttgtgcttacactaagaaattgtctgatgattccactatgtatttgttgttgtatgtggatgatatgcttgtggtggcaaacaacatgcaagccatagacgcattaaagaaagagttgagtaataagttggagatgaaggatctaggcgcagctaaaaagatccttggtattgaaatcatctgtgatcgtgaagctggtgttttgtggctgtgtcaagagagttacttgaacaaagtactcaagacattcaacatgctggaagcaaaaccagcattgactccgctgggagctcacttgaagatgaaatctgcaactgaagagaaactgagcgaagaagaaaagtatatgaagtcagtcccatactcaagcgttgtagggagcatcatgtatgccatgattggcactctgacttag

SEQ ID NO: 195615 - DNA, 412 bp, Arabidopsis thaliana landsberg
atgtctcggccacatgctaagcccgggaccgtgacgctggggaaaaatccgggcagcggcttctctctgctccatatcgaacggagcgacactggtgatgaaccaccccgatctagactcgtagcgcacttgcgacgactggttgaagggaaggggtgcctcagcgtcacttttatattctgcaaagaagtccgattggggctattttggcgagatgccgggcggaccatgcgcttggtttgttacgcggagaagacgcacaatgccagctcgagggggccacatggcggcgaccggaagaatcaacacgtgagcgaccaactaatgtagtggagccatccgccagtgacggtcccacgcacgccacggattgacggctgggccaaggtgtcggcgggacgaaaccgcgcgc

SEQ ID NO: 195616 - DNA, 172 bp, Arabidopsis thaliana landsberg
atggccaaggacaaagagagcccagaacatggttccttgagcgaaccagtagagaggccagagaagccaattgttgaagtaagcagcaacagcagccaatccaaagacgatagcaaaatctctgacaacataactcatagacatccatggattcttacccaacaatgcttag

SEQ ID NO: 195617 - DNA, 1680 bp, Arabidopsis thaliana landsberg
atgctgagtctcgcattaatagtcttgattgatggggttgttgtttgcagcaacacaaaacaacatcgggtaagtggcccatttgtcgagatgcttcatgatttggaattctttatgagctacccatggggagagtagcttttgaatcaacaatgggaaggtttggcccttccgctggggaaacatatcctattgcagaactcaagagccagctatctaaaaaagaagcagttgctaatacgggtttcgtcttgcacttcaactccaagtcctcaactccgttcatgctctttgtagtaggattaaagagcctacatatttcagaaattttatctaaaggcctgcagttgatcttggtcgcaccatctttctccgggagtaagatgttattgacgttgaaaacgctgctaatgtaagtaacattaaatactgtttatatatactggtatagttaagttttagagtgatggatacattcatttcatgcatagtttacctagtaattttgttttatgaattttacagttatcagtggaatacacactataccagtcagaagcagtgaacggagatctctcttggccagatgaagatgacgaccacattcgtagagatggtggacaaaatgtgaatttagaagcctctgatggtgtgtgggatctttatgggtctgcaaagagtattttagaggtattacttaaaaagtattgacgaccctcttatgtcttgttgtattaatttcccattgctgttcatcttatgtgtttgttggacaatatagaaaattactacagaaatttcttcctctcctattccaaccgccaatgcaaaagatccagatagcgaagccgttgaggatgatatatttgcttaggtaatactttgacaatattcgttgtatccagttctttgatgtcctaatcaatcatacatttctgaagctcttacactggttttaaaaacacaaataatccatacaaaggagactgcctctcgtattccaaacattcccaaccccactgttatagagactcaagaagaaatgtttgaggaagaaataattgctggttcgcctacacttactccttgttcactagtaacaccaatagctcaggtttagaattatgaagaccggaatgttcctcatccaattcctatattcttatatattcattgagtaacctgttttcggtttggaatactattattatgacatgttattcccgacacgcacaaggattttgcccttgatgaggttaaataccgcaatttatcctcgattgttgcatcatcacctgcttattttgttcaagagaggaccaatatccgtcagccgcttccggataagcgtgttcctaggtgctctcgcttcctcgacacagcggagtatagcgtagatcccatgattagtgctctgtttaagagcagaaccaagtaacctgcttacacacctctcccctagttggatgaagaagagttccagacatttaaagagttgcttgaagatgatcgagccaggtttgttccttgtataaacaataaacttgtttgtcaataagatttttggtttgaaaacctgtctttctttaatacagagaattcacaatttgcactggtcacaaagtgggtaataaccacttcttgcacattgcacgaaaggagacgtgggtctcaacagag

SEQ ID NO: 195618 - DNA, 136 bp, Arabidopsis thaliana landsberg
atgttcgagccaaatatgctgcttgcggctatgaacaacgcagacagcaataaccacaactacaaccatgaagacaacaataatgaaggatttcttcgggacgatgaattcgacagtccgaatactaaatcgggaa

SEQ ID NO: 195619 - DNA, 130 bp, Arabidopsis thaliana landsberg
atataggattttgagtctttttgttattcttagagtctttttagttaacgatgtcgatcgacacactcttggtgtcgatcgacaccggtttcggcccagagaagtccatgacgatttcaagtttaaagaa

SEQ ID NO: 195620 - DNA, 279 bp, Arabidopsis thaliana landsberg
  unsure (1)..(279): unsure at all n locations
atgccgccgcgctggcgtngacgtgccgaagccgttgccgtcctggccatggagcaacccgtcgccgccgacgctgagatggccgaggcgtcactactcggtgcctcagaggaggggggcgtggaactgcgacccgtcccgccgagcgcaaccttttccctacgcggcggagtctcaaggggcggcgcacgttgctccggttccggacccgtgaggcttcggatcccttcttcgttcttgacgatgagcgggaggagcagtcttgggacgagctcgcga

SEQ ID NO: 195621 - DNA, 114 bp, Arabidopsis thaliana landsberg
gagtatagtcgtatagatgactatacaatacacaacgttaattatccacaagaactcgatatactaattttggaatgccccaataaagggggtattactcttcgtattcactag

SEQ ID NO: 195622 - DNA, 420 bp, Arabidopsis thaliana landsberg
atggagcttccggccataccctctccaagttcatcgagttcgccacagacgtccccaacggtaacgacctctaaccgcgcgctgactctggctcaccgcgcggtgcgctgttcgtctggttccacgtctttttcggctggctccggacaggagcggttcgacggacataacggcgccgctgttagctattgtgcggcgatgtacgagaggacagaggtagacccagggtcaatctcaggtctttctatcacggcgcaaacaacgtcgaacataagcgatacggttgcgactacggttgctctcaaggtgcttattaccgcagtgaatgccagtgcgggcgtcgctagcgctacggtctctgcgaagattccagctttggagctaatcgcaagcccaactgccgacgtggccagaacagcg

SEQ ID NO: 195623 - DNA, 149 bp, Arabidopsis thaliana landsberg
caccgaaggttgagaatttactatgggaaggagaagtctaccttgtcactttaaccgccattggtggagaagttgaaaatgacccaaggattgaagagatctcggtggtgaacgaatttgaagatgtgttcaagcccttggaaggataa

SEQ ID NO: 195624 - DNA, 114 bp, Arabidopsis thaliana landsberg
ccaattgaaggatcagatcaaaataacagattccctgctggtgcaatcagattattggtcaccggagaattcgacaatgccgttccgagagaagcgttgcattacaagagataa

SEQ ID NO: 195625 - DNA, 49 bp, Arabidopsis thaliana landsberg
atgctctccgatcggaactggctcccccctccagcatggaggaacaagg

SEQ ID NO: 195626 - DNA, 755 bp, Arabidopsis thaliana landsberg
atggaggatgataatgagaaagtgaaaggttcgagtaaaaagaggttgagaaaacctaaaagcttggaatttgttggatggggttcgagaaatctcattgagtttcttgaatcacttggtagagataccaccaacaagatatcagagaatgatgttacagcgattataatgaactatatccgcgagaagagccgtgaaactcctttgaagagcaagaagaggagaaagacagtagcttgtgatgagaagttgcgtttgcttttcggtgctgggaagataaatgtaatcaaagtccctgatttggtagagaagcattatgtagaaatcaggaggaagacttattctatgatgatctctacgcttcagaggatgataaacaacagagattgtctctatcagataaggtggctaaacagacgaaacaggttgtgtcaaagcctagagggacttttgctgcaatagtgcgtgataatgttaagcttctgtatttgagaaagagtttagtccaggaactagcaaagactcctgaaacttttgagagcaaagtggtggggacttttgtgaggatcaagaatccttgtcagcttgttcatgtaaccggtaagctttagctgaatcctggttcgaaaaaaactaagattctataacttcttatattttttctgagattgagcttattcatttgtgacttcttttgactatcactaaccacatctcttattaactaggtgtgaaggaaggagatccgattgatg

SEQ ID NO: 195627 - DNA, 203 bp, Arabidopsis thaliana landsberg
cagtcgaccgttggatccgaccgttgtcgtctgcccgttggcacaccggacagtccggtgctacagccagagagcgcctgtctgcggcctctctgcgcagactgtccagtgcctcaccggacagtccggtgcacaccggacatcaatgtcctggtcgccaccaggcgctggctgacagcccgtttcttggattcctttgctga

SEQ ID NO: 195628 - DNA, 223 bp, Arabidopsis thaliana landsberg
gtgtgtaaatgacgaaagcgagtacattcaacgacggaagaaacagccagtgattcgcgacaggagatttgggtctagatctaaaagtcattactttattcgatgtctcttcttagttgtttctccaacggatttgttatggtttcttgcgacggttgtcttttatatggtgatgaagtgtctgttggttggtggaggcgatcgagttgttggtggcgactga

SEQ ID NO: 195629 - DNA, 95 bp, Arabidopsis thaliana landsberg
acaaagaatccatagggataagtagtcctgggcgtttgggtattcggttcgggttcggatcggttcttttgggttcggatttttcggaactataa

SEQ ID NO: 195630 - DNA, 276 bp, Arabidopsis thaliana landsberg
ttcaacaatctgggcagctcttgcgcatggtttactcaagacgaggtacacaacagattggcctactcttctagattatctttcgactcatcgtttcagccgggtggaggaatttctcacaaaatacatagtccaagctacagtctatgcgatttggagagaaagaaataatcgaagacatggagagaatccccaaaccgcgcaacgcattattggatgggtagataaacaaatacggaacagaatttcagcgattcgacttgcaggagataggcg

SEQ ID NO: 195631 - DNA, 320 bp, Arabidopsis thaliana landsberg
atgttgtgcgcgttcgacgactactatatcaaggtatgtgacgtcatcttggcgccagaggtgacataggtgaggatcgacagaaatgaccacttgccaccgtcagggtagcttttgtgccggcctgcctttaattctctttgcagacacatacacttgccttttttgtttaagcaagcgtgtattgtggtgcgtacctgatgactaacaatgtacgagagaacttgtaccgataggtgtggcatgtgctcttcaatgatgagaccatgcaaatcgtggcatatatcgaagtctgcatgatactgatcgctgcaatgtag

SEQ ID NO: 195632 - DNA, 127 bp, Arabidopsis thaliana landsberg
atttggacatgaaccttatccggagagaggtgaaaaccacgaacagagtgctgtttggtttcctaggtcagtggcaaataaaagcactggtttctctttgacacgtggagctgtcacagaccactaa

SEQ ID NO: 195633 - DNA, 102 bp, Arabidopsis thaliana landsberg
caaggcctaatgggttcaaaagcggtcctccgggatatccaggctcgagccctcgagtgctgcttcaattccaaagaaaaacgatccttctttggcttgtga

SEQ ID NO: 195634 - DNA, 353 bp, Arabidopsis thaliana landsberg
  unsure (1)..(353): unsure at all n locations
atgggcgtcnnnnnnnnnnnnnnnnnnnnnnnnnnnnnnnnnnnntcgctttcgctcccggatttctccagcttggccgtcgtcagccagagcgcgttggcaaggccggagggcatcgcggcggtgggctcgacggtcgggatgttgcgccccgatgaagaactgccgccgccgcccgtgccgccggaaaggctgttgtcggccgtcgccgtgcgctggcgggagagcgcataggcggaaagcgtgctgccgtcgatcttcatgacaatggctccctgaaacaacttcagggaaccattagcggttgcagcttttgcgagactggaatccggccgtgctacggcagcgtatag

SEQ ID NO: 195635 - DNA, 182 bp, Arabidopsis thaliana landsberg
atggagtgggaactgaacttacttaagtctgtcaagttattgggatctgatatctgcaatcagatcattgatgaagtcagtcttacaatccgtcttagacatctgctgttggctcagggctatattcggatggaagacgagccaaagattgatacacatcttgctcgatgtgaatcgatcag

SEQ ID NO: 195636 - DNA, 371 bp, Arabidopsis thaliana landsberg
ccgtacgagcacgtgcccgttcccaattatttcccggcaaccgctggctcttaccgcatttatgcagtcgatgaagcgatttattcgacgggcaacaaagaacagaaggttgccagttggtttgaaaaagaggaaataacctattccaaaaaggattcaaacggcgtttcagagtgccttatctcctattcaacgcgcactaaacccaccgattactggcaaaagaccaaagaatataaagcctttgtctccattgataaagtaatgcagaataaggataatgaattaattacttcgcttgtattcccttacagtccggctgctaaatgggatcctttccagcatttctctatgaatgacgaggatccccg

SEQ ID NO: 195637 - DNA, 1476 bp, Arabidopsis thaliana landsberg
atgacccatcaagaagcccaattggtgaatacactgaaccgatcggttaaggaagatgccgcacaccgatcggttggacctttgttaaaccgccttttcttctttttaagattttgtcccaatccttataaataatgtttgattctttagcagcaaggcacactttacttttacgattttatagcttttgaggtgttcttcatttcttcatattctttctttattgtttatgatttactatttcaaagccattggtaaatctcctttaaaactcttgatccttctccttcactgatcacatgtacctataaaaactggaacttaagatgaaaaccctagaacctcttagagcttcttttctcacctcccttcacaacaagcttgacacctacagccttcaagctcttcgtcttccacctccaatattttagaattcgtcccttacaaatctctcttgttcttcattgctgtattttctcttctattctattctttcttgtgcctcttttggggagataagttatcttttctgacatcgagagaagtttcctttgaagctttttgtttattgattttttatgatgatatactttatgatatctataccatttacttgcatcatgagcgagtagttctctttgttgaggtttatgggctgatttaaggggattcatggttcaattcttgttaaattagtagatcttattttgctcatacttcaaatcttttgagacatcttttacttaatacaagttgtttggattgataaccaaacactgatccaagatggtatgagctctaatcgggtaaacttaacctaaaacctagagttaccgaatcttagtgtcgtaacctgcgtaagttgagttgtggagctaagagaacatagcatacctgatcctcatgctttaatctatgtgaacgtaagttaagtaataacgaagtatatggatatcttccgattaagtctataataccctagggttaatcgtttatttgtgttttgtagctaggaactagaacgaaaatattagataagagatcctaacattagttagtcgagaactatgataccctgagaaactctagaacttccaacacctttaatccatagcttacaaatgacgtttacattcttgcattacttatttcatttcttagtcattaggaaacccaaaaccaaaaccaaaaccaaaactccaaggtttagttttgtcttagtcagatcttcttcttaatttgaattcaatctctatagctatctctctttgtgggatagatccttaaatatgactagtaattaatgtgcatttgtagttagaggtgtcaagcgggccgggcttggcccatatagtaccataacgggccaggcttggacactatattaaatgcctgtaaaatagcgggcctcaagccggtccaaacggattgcgggtgttagcggatttggtccacggattggcggtcggcacgcag

SEQ ID NO: 195638 - DNA, 506 bp, Arabidopsis thaliana landsberg
aaagagtcggctgcatgcaacggaagtttgaccgtccgggaagatgaaccgccaaagtcacgacagtggaagatgaatagtcggctcggatatctactcgtgaagctcatcgcctcccttgccggagtcaataagctggggggcaaactgttggggtcggatttcatccaggtaaccgagccgaccaggatcattggctcgggcatcactccaaagaatcatcccgagccgaccctaaaacaccttggacgtcacgtcgaagaaccatcctgagccagcctcaaacgcctcgggcatcactgcagagagcctcccagatccggcctcgaagtgcctctgataccaactcggaaaatcatcccaggcgggtctcgaagcgcctcgggaaaacgtcattcggctatcctgatccgagccgcccgaccatgatccaaggattaactcgacctgactcgggagaaactttggacaaagccagaacacctttgtcccaggaaaagacttaa

SEQ ID NO: 195639 - DNA, 609 bp, Arabidopsis thaliana landsberg
atggagtcgacgaatttgaagaatgctaaacacgagactctggtgatggatccgatcagttttcaatccaaggctcaagaggtttcacgattctccgagaattctaaccctaacttcgtctcacactcgactccactcgagaaatcgagtaaatcttctgcgcagaagaatccgaaatggaagcctaatcctgttccggcggttttctcaccacggaatcggatcagagagaggaggttcgtggtggtgaagaagaattcaaggaaggagaagaatgattccgcgtctgtggattgcaaatgtggagctaagaccatttccaatataaagaaatgtgtctgtatagcatacgaaactctacgggcgtcacaggaagagttcttcaacaatcgaagagaatccgtatcagaaattggagaatccagccagaatttggaggatggaaatgaacaagtcgaatttggagattctgatgaaactagggtttctttgatgaagaggagaagagaaaaagtattggaagaagcgagaatgagtatacctgaatttggtaaagtgatgcatctagttaaagcttttgagaagcttacttgcttcccactttcgaag

SEQ ID NO: 195640 - DNA, 170 bp, Arabidopsis thaliana landsberg
atggtgggctttgcttctgatgccgcagctgtggcactcaacgcacaaaaaggagccgttgttgcattggatttacttgaattgggtcgtggtgtgcttgcagcatctctcgacgagatccgagtagatactgaagatcttcagcataagcaccctgtcatggctgagag

SEQ ID NO: 195641 - DNA, 124 bp, Arabidopsis thaliana landsberg
agtagaactacatccatgaaaactattactgctcatatcctcgacaaagcgccagtgaacgtgtgtgcgacgaggagggacgcctgctgttctgagtccaaccaactagacctacaactgaaag

SEQ ID NO: 195642 - DNA, 218 bp, Arabidopsis thaliana landsberg
  unsure (1)..(218): unsure at all n locations
atgccggagtctgccatacaggggcaaagtcacggtaaggagcccnnnnnnnnnnnnnnnnnnnnnnnngtcgttggtgagccgatggatgctgggacgatgttgccgatgctgatgcagacgcgtgtgtcgtggaacggcgcttccagggaaccttggtaactactgatagcgcagctcgtggcagtggtaaggtgggcgcaccgacagtgatgaag

SEQ ID NO: 195643 - DNA, 465 bp, Arabidopsis thaliana landsberg
atggaggaaggcaacgctgtgggtaatttggtgagcatgattacgctggaagttaaatctctgagtgaattgggtatgcttgctgcaagagatggtggaaatcttgtggccattcttaatacatcttggaagggtgtgattacattgcttcaactagacaagcagacattggtatctaaggtagatgtaggagaaattatcttaaagctaatatcactgatcaaggactccctgagatttgctgctgaggcttggtcttgctcggtgaaggaaaacatatctgcaacggaagccagaagggtctttcttcctgtgaaattttatcttatcaatgctgttaaagttgtggcgctgtttccaagccaggcgtctatggtgtccaaggatatagcactatgcatcttgatgatctctgctttcaaagtttcaaaaagccaaaaaactcatggaaaatccgcaagtgaa

SEQ ID NO: 195644 - DNA, 112 bp, Arabidopsis thaliana landsberg
atggctggcctgctgctgggcaagccggtgggcattaccctggctgtctggctggccgtgctggccggggtatgcaaattgcctccaccgctacgctgggcacatattgcag

SEQ ID NO: 195645 - DNA, 954 bp, Arabidopsis thaliana landsberg
atttttggtgatggttttggggggaaagaaaacagaaaatataaaaataaaatttccgcactcccgactcttggtgtggtaggcaattctgaatcgcgaggtttagttctccggctgaatcagagaacgacgagtcggaaaaattcgaaaccctagaactgaataaatgtcgacgtggcaattatttcccgattccagcggcgatggtttccggtgggaagtcgctggccggattcttcagtccgtctcggattctacgccaaccaaggcgctcgaatcgacagctcctctaccttctatggccgatctcttgctccaaggtgattcttcgtttcttcctttttttgtcgaatcgtgtttgtcatgtgactcaaaggagattgaattattatttgatgcttcaaggatgctcgaagcttatagaacgggaagaatcgatgcctggggaaatcccaatgttcaggactgggctggggaagtctgtagttcttaaagagtcttcgattgctaaagccaaatccattttagcagagaatgttgcttattcaggtattttatgtgacagtattgaattcccttgactagtcatttgtttctgaattcgcttgaattgttacttaatgttggtgaatatgtgttcctgaaaatcttttgaatgttccatgttcttggctacacttttagatttgcagaacacaaattgctcaattccccaaacgagacaagtggatacagctgaaactatgccaatgttcaggacggccttggggaaaactgtccctttgaaagagtcttcaattgccaaagctttgtctattctaggaagtgatatgataattgactcaggtgtgttcttatctcctctttttttaagtcttatatccagctgtgtgcgcatttacatatgaacttgttgtttgtgctgctactccgttcaacttccaggtttcttga

SEQ ID NO: 195646 - DNA, 56 bp, Arabidopsis thaliana landsberg
gcgtcaccgccttagcatacaatgctccactgaccccggccgccgccgtgaagtga

SEQ ID NO: 195647 - DNA, 857 bp, Arabidopsis thaliana landsberg
atctggacgtgcaatgaacttgtgggtcaagttaaggaagcccaggctggtgcaaaaatctttgcggaagatcttcaatctgcaagtgcccggatgcgtgatatgcaagaccagctgggtattttggttcgggaacgggattctatgaaggagagagtaaaagagctgctagcagggcaggcgtcacactcagaattacaggagaaggtcacatctcttagtgatctactagctgcgaaagacctaggtcagtttttctcttttacccttttgtttttgcaccgccacatatatagctgatacctaattgcttcctgcagaaattgaggccttaatgcaagcgcttgacgaggaagagtctcagatggaggatctgaaactcagagttacagaattagaacaggaagtgcaacagaagaacctagacttgcagaaagctgaagcttctcgtgggaagatttccaaaaagctatcaattactgtggataaattcgatgagctccatcacctctctgaaaatcttcttgctgaaatcgagaaacttcaacagcaagtgcaagatcgggatacagaggtttctttcttaagacaagaagtcactaggtgcaccaatgaggctcttgctgcttctcagatgggcactaagagagattcagaagagatccaaactgtactgtcttggttcgacacgatagcttcactacttggtatagaagattcgctgtccactgatgctaatagttatataaaccactacatggagacatttgagaaaaggatagcgtctatgctatctgaaatagacgaattacggttggttggacaaagcaaggacgttttgcttgaaggcgagagga

SEQ ID NO: 195648 - DNA, 312 bp, Arabidopsis thaliana landsberg
gatgatgttggtcgtgcagtgttcatatccccaacaggtcaaaatcggttacaggtttgttctgtctctttcttcatcaccaatttatgtatcattcattgacacatacacattttgacctttttcttcatatagtcacatcactcttggctgcaaacaagtattagagcaggaaggaggatacgaattatatcacgtaggagatcatcgaggaatcaacaacattccgatctctatttcaatgcatctgatcaaaatgcagacaatacctcctctcctcgacttaccacagatgtaactaatggaatcatg

SEQ ID NO: 195649 - DNA, 173 bp, Arabidopsis thaliana landsberg
gatccataatcaacctgatgcccaagtctgttgctgaaagactaaacataactacctacatgctagcacgaatcattcttttcttcgcggatcgctctaaacaagtccttgaaggtatcttcgaggatgttcctgagaaagttggagattgcctcatcctggcagattttgtg

SEQ ID NO: 195650 - DNA, 255 bp, Arabidopsis thaliana landsberg
atgtttgaaaaagttcatgcggtatatgatgaaaaaggcaaacgctcattggtacccactggcgaagaccatgtattcattgaagcggacgatgtactcgtagctatcgggcaagaaaatagtttcccctggattgaacgtgatttagggattgagttcgataaatgggaaatgcctaaagttaatgcagatactttccaatcgacaaatcctaaagtattcttcggtggtgatgcggcattaggacctaaaaac

SEQ ID NO: 195651 - DNA, 50 bp, Arabidopsis thaliana landsberg
acctttctgatgaaccgaatgtaacattgcctgagagaataagatgttag

SEQ ID NO: 195652 - DNA, 233 bp, Arabidopsis thaliana landsberg
gacaagaaccctggagcagccccagcccgctcgaccctccaatccacaacgccgtcgttgtccctgcctatgcgcagtccaaatccctgcaacaagcctcgccgagcattgccccgcagcagcatgcaccttcgcctcacgcgtgggtgctcggcgaatcgcagcagcgagcctacgcctccgcgtcgcttcagtcttccatgtgcgacgacgcgttcgtcttcgcgtcacat

SEQ ID NO: 195653 - DNA, 846 bp, Arabidopsis thaliana landsberg
atggggaaatctggaggaaggaagaagaagagtggtggttcgaattcgaattcaagtcaagtcaattcatctgaaacttcaggattatccaaaccgtcaacgattgttaatggtggtgttgatttcgatgcttcgatattcttgaaacgtgcacatgagcttaaggaagaaggtaataaaaagtttcaagcaagagattacgttggtgctcttgaacaatacgagaatggtattaagcttattcctaagagtcatccagatagagctgtgtttcatagcaatagagctgcttgtttgatgcagatgaaaccaattgattatgaatctgtgatttctgaatgttcaatggctcttaaatctcagcctggttttactcgtgctttgcttagaagagctagagcttttgaagctgttggcaagtttgatttagctgttcaggatgttaatgttttgttgggttctgatcctaatcataaggatgctggtgagatttcgaagcggttaaaaactgctttgggtcctcaccaagatttgcagagccgtccttcacctgcagctcttggtgcttcggctgctttaggcggtcctattgctggacttggtccttgtttgccttctcgtaatgttcataaaaagggagttacttcgcctgttgggtctgtttcgttgcctaatgctagtaatggtaaggttgagaggccacaggtggtgaatcctgtgactgaaaatggtggttcggtgagtaagggacaggcgtcgagagttgtgttgaagccggttagtcattcgccaaaagggtcgaaggttgaggagttgggttcttcttctgtggcggttgttgggaag

SEQ ID NO: 195654 - DNA, 1578 bp, Arabidopsis thaliana landsberg
tcccgccgaactcactcacctattcgaactcatagctcaagcaagaacgagttcaccttcctacgtcgacgaaagattcttgccgagcttacacgctttgtgtcgacctcgactcacctagtgcacgatccaacatgcattgaccttaacgcatatcgtgcaacctcaacgcaacttgtaccgacctcctatcggaaaattgtagccgagctcaaatacctcgtgctcacatttacgcatttcacatcgatctcgcctaaacatctctacggccgacctcctttatctttcatgctcctcacactaatctcaccaagtacaccttcaaaattgacctcattgagctcttttatacatgaccagcacgccttgcatcgattttagtatcttcaccgagacgttcctcgtcaaaacaactttgctcttgcacaaacacctaactcttcaaaagcgcttatctccaaaaatcatcaagctttcccgcgagctcctatctcaaaagatcttttagctcccccacgagcgcacatctcgaaagatcttctacctctccaacgagcgcatatctccaagatagtcaagctctcccacgagcgcatgtctcctatgatcgtcaagctcgcacacgagcgtctatctccaaagatcatcaacctctccaacgagcgcatatctcagagatcttctagctcacccacgagcgcctatctccgagatcctcaagctctcacacaagcgcctatctctaagattttcaagctctcacacgagcgcctatctccgaaattgtcaagctctcacacgagcgcctatctccaagatcgtcaagctctccctcgaacacctgtctccaaagatcttctagctctcccacgagcgcctatctccaagatcgtcgagctcttccgtctcgtacgagcacatacatccaaagatcttaaagctcttccacggacgcctatctccaagatcgtcaggctctcctgctagcgcatatctcagaagatcttatagctctcccacgagcgactatctccaaactcatcaatttctcccatgagcacctctcttcaggatcgtcaagctctcccgcaagcgcctatcttcaaagatcttccagctctcccacgagcgcctatcatcgaagataatcaagctctcctacaatcatctatcttcgaagatcgtcgagctctcaaacgagcatatatctttccacctcttgcgattctccgactcttgcaaaaatccacacttgctcaaacaaagaatttttccttggttcgggccaaattggcatagttccgatttcaggaaaatgttcgccgatcgcaagcaaccttctctcgccgaactcggggggggactaattgtgggatacgggctttgccctccatgcccaattcggcccaaacacaaatagaacaagtcaagaaagctactaacaaggaagaacggccaatcagaataacagcccatcagaatgactgctcggtccatcacagctcggcccatcacggcttggcccagcccgataaattcagaagggcaaaacggagaaatcgcaagagagactaa

SEQ ID NO: 195655 - DNA, 97 bp, Arabidopsis thaliana landsberg
attaagcatatgttctaagaatggaagatactattatacccttatccgaataagaggatcttctgtggatcgggcaagtagaggtcgtaaactgtag

SEQ ID NO: 195656 - DNA, 165 bp, Arabidopsis thaliana landsberg
aagctgaaaattgaaggatttaagcttgtgctaaacttgcgaaaaaaacaaactttatcacaaaaatcaacgaattttgacggagatagaagcagacttacaaaacttcgaaacccaaaacgtgggaaaagagaaatttcacgacttgggccgaaaaaaacgtga

SEQ ID NO: 195657 - DNA, 335 bp, Arabidopsis thaliana landsberg
atgctgactgtaactatctcaaattcaactattgattttgatcgtggatcaattccaagtactttattagaaataaaaatgtcttaatatgaagacattatttaattaatcaatatgttctgtttccagttacaaagaaaaaactctttcaaaattttgattttgagaaagttaatacggctcgctttggtgtgatcatgataaaagttaaaactttaatttcgagttatttttgtattacaaatgtctataaatgtataaagatggaccgtatatacggtcggatgtgccaaggaaaaagaaagcgtcggtggttccaaaatccacattctttg

SEQ ID NO: 195658 - DNA, 180 bp, Arabidopsis thaliana landsberg
tttccacgaacaacgattccacgatgcagctctctcctcacaacattctgatcttcagcggacgattctgcatatacgatatttttacgatggataagctctccctacaacattcagaccactacgaacgactatgcatactgcactatggatctccaataagatttgcatcattcatct

SEQ ID NO: 195659 - DNA, 528 bp, Arabidopsis thaliana landsberg
atggacgattatacaagagagatgatggatctcaagaccttagtcactcgaaccctagagaagaaaggtgttctcgctaagatccgggtatatttgtttttctcttgccacgattcctctggttctgtgacatacttcattcaaattccgtagagagatttgagtacagagaagaagagaaaacatacattgcttttctagggttcgtgcttccagatctactttatgcatctggaatcatgtgaattcccagtttttgtcgtactttgaaattgagtctgtgaaaaaattgtaccttctcagctgaattggattctttaacatttggtttggagattgaagatttgtttttttttctctatattcttctgctgaaattttagttgtttctgtaggctgaactccgtgcaagtgtgtttgaggcaatcgaagaagaggatagagtgatagagaacaatgaaggactgcctccagctttgttgggaagctgcaatgatcgtgcaaggcagcttcatgcttctccttcag

SEQ ID NO: 195660 - DNA, 463 bp, Arabidopsis thaliana landsberg
atgacgatcatcagcccttataatcgggagtaagtgttaaagcgttatgtaatgaatatactttctaagttgtataagttggtattctataaatccatataaatatacactcagaaatcggaacatttctgaatgtatattttgcttactcaaccctcaaatgaatatttatttccacatttttatatataatatctgtgttattgtaacaattatgggcttgcatttttaataatgaaaattttcttgatatgaacttaattagataaaataagttgattgggttgctatctcattggccttggggcttaaacgtgggccgagatagataaacatataagcctatttaaactttcatcatctattgttaagtgttggtcttgggtttgggcttaaaccgtttatgacccaaaacattcatgaagataaccaaagaattctaaagcagaacactgttgactag

SEQ ID NO: 195661 - DNA, 546 bp, Arabidopsis thaliana landsberg
atgcttctaagtttagtttctgggctttcccgtggtttgagtggcttaagctctgcgggtcattcatcgggacaagaatttctcaggtctgatgcagtgaatgtggaacatgagatcgaaaggaatccttgcaaaactctttttgtagttaaagcaagcattaagctgaaggatatagatgtgatatttgatgttcctgcagtagacgacaaatttgagaggcttgtggagctagatgatacaaaaatctggtcttctgtccaggaagcaatcattgaactatctgttgaagaacataagtgtttaatcaatgttgatttgtgtaaactccaatcagttctcttcaaatttgagggtaatatatggaagagttctggcaactttatcacagaatctttgctgttcaggtcacatgatatcttgtttgaagcatgcctttctagctgcctattgagtgtctctatggattgctcaagcccatcagctctaggggacgcatcaacagcaaatgaaccttctacaaacaatgttcaggttcagagagaa

SEQ ID NO: 195662 - DNA, 95 bp, Arabidopsis thaliana landsberg
ttatcggagaattacagaagaatttatactcgattcattcgatgttagtttcaagctccggtggaatcgatggcttcaacggcgaaagaggatga

SEQ ID NO: 195663 - DNA, 311 bp, Arabidopsis thaliana landsberg
gaatccgaagctacaagaaacagcttgaagattcatcgagttttttctggaatttgaagatcgatgaaaagtttcgtcgtggacttgaagatttgtcttctcctcttgaaatttggattcgtttatgctttttagatcgaaattttcagatatttttttgtgttcattttccagaaaccaatgctcgccactcacagagagagagactctcagagaatgataaagcttatcctcaaaccggaaataaccggaattcgaccatcgaatcggttcaaactttgcttcaaaactttcggttcaattcggtttag

SEQ ID NO: 195664 - DNA, 849 bp, Arabidopsis thaliana landsberg
atggagaaatttgagttagctggaacttgtaaggatgatgttgttgagataataagtgaagattatgtggcaggcaatacattacgaggtaccacgtgatctagttcaatattgattttgaaaaagataggccatgatgtttgatataatcctttttcattgctgcagatataaggtttcacatggaagagattatacagatttttgacgagatatatgaagcaaaacattggacaaatgggatcccttcagaccagttggaagagatactaaagagaagggctgaaaatatatttcatgtgccaaatatagcaatccaacgtggttgaagcggtttccatgacaaagtgtctcagaatgattttggtcattatcttgatcaagcttcatttcaaggtacatatataatctcacgaaattgttaggtctgacttctgaggaactaaatgttgttggccagtgttagggctgaaccttatgttcaagatgataaagaaacttaatcagaccagactatgcttagtccatttcatttcattgtccagactatgctctgtcataactacctaacttttattttacttattgcgactgttataggcaatgcttttacttctttgacctgaaccaataagtgttcacattctggataccacttgggtttgaaatcatcatctaaccacaaaatctctctttgcaggtttttgtcttgttgtggtacaaccaaattcagatttttgtagacagaaagaaacatatatgttctattttgtttgtgtaacatttataccattgattttggtgaggggtgaagcaaagatatcatgcagattcttcttctgccacagg

SEQ ID NO: 195665 - DNA, 482 bp, Arabidopsis thaliana landsberg
gcgcaagcctgcccggcgtggtcgaggcggacaacctcggcacgtacgtgctgaagttccgcggggcgggccacggcacgctcgctctcgtggccgagatcatctgcggggagctggcgcgccgtctcggcctgcggaccccggacctcgccctggcctggctggacgggcgcatcgcgccgagcgagccggacgaggagatccaggatctgctgcgggccagcgagggcctgaacctggccgtggacttcctgccgggctcggccgggttcgacccgctcggctggaccgccgacgagcagcttgccagcgaggtgctctggttcgacgcgctgatccagaacgtggaccggacgtggcgcaacccgaacctgctggtctggcacggggacatctggctgatcgaccacggcgcggcactgtatttccacaatgactggccgcgggcggaccccgggaagccgttcgacgccaagcatcat

SEQ ID NO: 195666 - DNA, 98 bp, Arabidopsis thaliana landsberg
attgctcagacctgatccgaaacttaaggtttcgatacgtcaaaggttgggtcaaaaaccgaaaccctaaaccggataagactgaagtgaaactttga

SEQ ID NO: 195667 - DNA, 315 bp, Arabidopsis thaliana landsberg
atggggtttgaaaactatttgtttggtaataatcagattcgggtgataccgggtaaggttccgatccgggtaattagggtataaaactattatccagagtaattagcgagaaattacgggtagagtttggttatttcgcatatctaaaatcgctatagcactttctaatttcgtaaggtttggattttagacctgatttctagccgttttgggtagcttttagctaattgtttggtaactgggctatccgtatcggatatcggcacacgggtaatagcgggtaagggttggattcccggtactctcaccagttga

SEQ ID NO: 195668 - DNA, 96 bp, Arabidopsis thaliana landsberg
ggtactgtgtcgccacgggatagctcggaggggggagaagatgaacgcctgccatccgaaccatctgcgacggccatgatcgcgtcgagcatatga

SEQ ID NO: 195669 - DNA, 539 bp, Arabidopsis thaliana landsberg
caaggcgccgccagagaccaccacaaggcaccgttaagcgacgtcgtcgcaaggatcacgtggtggggacccttattcggctgtcaggtggggcacgtgcgttcatgtgcataatataaacatcttcgccttaagaagtcgacacgagttcttgttgtctcactgaacatggaacgttcgatggaaactcagcggtcgtggggcctcaattattggacggtccagatcgatcacccaactttttttctcctcgtgatctcgggatagtgtcggtcagtaaattccaaaccagaagcaattacgttattacattaaccggttctaatttttaaaccaaccgacacactttgattaccctacgcctccacgtgcattctatttgaaacccgttcatgtttcatttttctctcgtagtatttaattgcatgattctcccgtggctattaaactacttactaaccagtgattcatcgccgaattggcgacaatgtcggtttatgtactgtttgatatatcggaaaagtgtcatgttaaactag

SEQ ID NO: 195670 - DNA, 155 bp, Arabidopsis thaliana landsberg
atggaaaggatcgtggtattgatgggcaaggccgatcaacaggaccaggttgcccggttattactggagaattttgaggagcccgcttttattcatgccaggaaaacaggaatggccaaaaccatcctggattattttgttggtggaggatacag

SEQ ID NO: 195671 - DNA, 727 bp, Arabidopsis thaliana landsberg
tctaagttctagttctgatgatgaggaagaccctttagaggaattagggactgattcaagagaggaagttagtggcgaagatagagattctggtgagagtgatatggatgaagatgctaatgattctgactcatctgattacgtgggggaaagttcagattcttctgatgtagagagctctgatagtgatttcgtttgttctgaggatgaagagggtggtaccagagacgatgctacatgcgaaaagaacccaagtgaaaaagtataccatcataagaagtcgaggacttttcgtaggaagcataacttcgatgtaattaacctgctagctaaatctatgttggagagcaaagacgttttcaaggaagatattttctcctgggacaaaatagcagaggttgattctagagaagatcctgtagttagggagagctcaagtgagaaggtaaatgaacatgggaaaccaagggaacggaggagtttccataggttgagggagaagaaccacttgaatggtgagagtttttatggtggcgaaaaactctgtgatggagaagagacaataaactactcgacagaagattcacctcctttaaacttgagatttggctgcgaggagcctgtgcttatcgagaaaacagaagaggagaaagaattagacagcttgtgggaagatatgaacgttgctctaacattggaaggaatgcactcatctacccctgataaa

SEQ ID NO: 195672 - DNA, 72 bp, Arabidopsis thaliana landsberg
atgatcatcaatggaaatcactcgttcagatgctcgaagaaaggaaatcgtcctcgacggatcgtcttaacg

SEQ ID NO: 195673 - DNA, 90 bp, Arabidopsis thaliana landsberg
gacctgcaggatttagcctgggaagccaagtcgtatgcccggacccacaggatcatagttccaaataccaagggacccgttgcagagttg

SEQ ID NO: 195674 - DNA, 203 bp, Arabidopsis thaliana landsberg
aaattgatctgacagaggtttatatgaccggaatctctatgctgccgaatataccggtttacgagaattcgggttttatggaccagaattcgggttttatgtaccagaatgatgaaccgacgatgaatgcgatgccggatggttcagatgtgtacgatgggatcatggaacgcctgtattttaagtttggtgtcaacatgtag

SEQ ID NO: 195675 - DNA, 90 bp, Arabidopsis thaliana landsberg
gtggtgacttattcaaactagaaaactataaagttgcagaaaaaacaaaaagatgtaggcccaaccgattgggctttattcttcagaaaa

SEQ ID NO: 195676 - DNA, 398 bp, Arabidopsis thaliana landsberg
agcgctttcctcaacgggccaatcaaggaggaggtgtatgtggaacaaccccttgtctttgaggatgacaggtatcccgaccatgtatttaagctctctaaggcgctctatggacttaagcaagccccaagagcatggtatgaatgccatagagacttcttaattgctaatgctttcaaggttgggaaagccgatcccactcttttcactaagtcttgtgaggagtttagcagggtgatgactcaaaagtttgagatgtcgatgatgggcgagttgaactacttccttgagatgtcaaaagtacactcaagatgttctcaaaaggtttgggatgaaggacgccaagcccgtgaagacaccgatgggaagcgacgggcatgtcgacctcaacaaaggag

SEQ ID NO: 195677 - DNA, 645 bp, Arabidopsis thaliana landsberg
atggtaaaaaaggccaatggcaagtggcgaatgtgcatcgattttacagatcttaacaaagcttgcccgaaggatgaattcccactaccaaggatagattctttagttgatgcagcagcttcttcagagctcatgagtctgttagactgttattcaggctatcaccaaatttggatgaagaaggaagatgagccgaagactagcttcataactccaagtggcacatattgctatcttcggatgcctgaggggctcaaaaacgctggaggaagtttcagccgaatgactgcgaaggttctccaatctcaaataggcagaaatgtgctaacttatgttgatgacatcattgtcaaaagcacgaagcaggagaatcatattgctgatctgcaggagaccttcgccagtttcaggcaagctggcttaaagttaaatccagaaaaatgcgtcttcggagtgaagaaggggaaatttcttggatgcttggtttcaacaaagggaattgaagctaatccaagtaaaattgaagctatacttcggatggagccaccaactacaaagaagggggctcaaagattaataggaagattggcatctctcaatagattcatatctagatcggcagagagaaacttaccattcttcgaa

SEQ ID NO: 195678 - DNA, 169 bp, Arabidopsis thaliana landsberg
cgcaaaacaacttaaaaaatccgaaaatttggcaaaatcagcaaatcggaacttacccccattactcagtcgacgatttgagctcaaaaccgaatcttcaatcccggaaatcgaagacagcttcgtccttcgttccttatcggcgagacaacgactccggcgaggatag

SEQ ID NO: 195679 - DNA, 442 bp, Arabidopsis thaliana landsberg
atgcacaactccatgaatggtgctgctagaatctctttttctaacgagtttgtcgagatcagatcggagaagagtaatgctaagagcaacaacatcaactcgagaagctctttctccatgccctcagctgatttcgctttctcagtcaccgattactcgatgattcccgccgatgaaatcttcctcaaaggaaagattttaccttttaaggagaccagtcacgtccataggaccttaggagaagagcttcttactgaagaggagggttctatggtcgatggtaacactttctccctcaggccaatattgttgtcttcttcatccttttccacaaagggcacgtggagggagcttttgggacttaagaggacccatgttagatctaagaagactgataaagtcaatgaggaagtgttaagtcaagatcacaaaataatctcag

SEQ ID NO: 195680 - DNA, 217 bp, Arabidopsis thaliana landsberg
caaagacgtagagagaaagaaacatagaaacaaaagattgagggaaaaaacaataagagatacggataataagaagaagtcgaaccaaagcttcgataatgacgttcactacaaaagtagacaacgacaacctaatctaaatcgcagattcaaaggagaaagagaggcaaaaccatcaaccttctccgaccgaatccaacttgccttctacttctag

SEQ ID NO: 195681 - DNA, 320 bp, Arabidopsis thaliana landsberg
atgcatctccgtctcccaacgtcgagcatgctagcaataggagcggtaactacagtgcctgtgaggctacgacggcagaggctccgctcgcgagaactgcagctgggcgagttggtgcttcggctccgacatgacgcccgtggtagccacatagtaacgcgcccctgggaagggcctttggtcatcgccagagctctgaggcccggatcatacccgctggccagcgatcaacgcgacatctacgtcaacgcttgggacaccatacaactacgtcgcatctaccctgaaagatgtcagcaagttgcacatatgcctcttac

SEQ ID NO: 195682 - DNA, 324 bp, Arabidopsis thaliana landsberg
atggtccagtggttgatgactcgctttgttggtcgatatcatcgatcaaatgcttttcactgtgtttcaaaattagccactattaacaatttcagtgggaagaaaatccaaaattttggaattcctagggctagattgagttctaacgaaagttataatcagttctcagaaaaagaagaattggttataaaggatgattcgatgttcaagaacaataaaccgccgaaatacggaaaccttgtaaccatcctcagcctccatggcggcggagtccgaggaatcattgggggagtcattcttgctaatcttgaaaaacatcttcag

SEQ ID NO: 195683 - DNA, 338 bp, Arabidopsis thaliana landsberg
aggttttgtaccaaaatctgttgaggagtggaaaaggggaaactggactggtggttgtgtgaggcataccgaactagattgtctaggaaactctactggcgaagatgcagatgacttccatcaaattgccaacataaagcctccagacttttatgaatttgcaagttctgtgaatggtgaagaatgccaccaacgttgcgtccacaattgttcttgcttggcatttgcttatattaagggaatagggtgcctagtgtggaaccaggacctaatggatgccgtacaattttctgcaacaggagaacttcttttcattcgtcttgcacgatctgagctag

SEQ ID NO: 195684 - DNA, 140 bp, Arabidopsis thaliana landsberg
gtgataagacgggaatacccctcaattggcgaaattcagaaaaggaccaagagagagaagaagacgaaacgatcgtcagagatagagagagagaaaggtcatcacccattctcactcgcagaagatttgttctcatctga

SEQ ID NO: 195685 - DNA, 134 bp, Arabidopsis thaliana landsberg
catataactcaaccgtgacatgtaaatttaccaaacctttcgtctttcctgaagcatataactcagctgtgacatgtaaatttaccgaacctttcgtcttctccaaagcattaaaactaagtcgtaacatataa

SEQ ID NO: 195686 - DNA, 901 bp, Arabidopsis thaliana landsberg
atgaagccagagtctgcctacactcctcatgtcccttatccgaggaagcgtcgctctaggcaagagattcatgctgctaagtgcacagttatcatggaaaagatcctcccttctctccctaaggatgcttctgagacatcttttgttccactcaacaggtatgtcaagcgacttgttgacaatggtattagcttagatgaagctaaactgctgaccagggacatcagtgcaatcatgctgcctacggtaaggaaagaaaaggcacagagagtggacattgctgactacatccgcaccattactcttgatcagaccactgagaagcttccggatccaggtagcttcgttcttgattgctctatctccacaagcaggttcacttgctctttttgtgatctgggatcaagtatcaaccacatgcctaagtctgttgctgagagactagacatgactaactacaggccttcgcggatccacaatagagatttgtacttaagattatgagaaaggagggctagatcttcactgaaaccttgagagttatattgctaagaacgaatggacttttgtattgattttgacaaagcttttacattgagaaaagagattacaagtgtaaaagtgtgtgtgtgccaatgtgaattagattgaatgtcccttccaagtcgtccttgctcccttatataggtctacgcacgtggttgctccgtccgggatctgcggagatcctcctggatattcggcaggtcagttccgagatatcaggtacgctccgcaaatatatctgtgttagtttgtaggttgttattcgcttatctccctttatcaggtgaccgggcttatcaggcccaagtacccatttgcgtacgtgggctcatcagttgtgcaggttctctacttg

SEQ ID NO: 195687 - DNA, 1007 bp, Arabidopsis thaliana landsberg
ataatacgattgaaggatataaggtaagatgcgtttttggaatacaaagccggcaagagataaactctatcagaaacaaagccggcggaaaatgagtaaatctccggaaactaagcccaaacaagggaagcataagatagaaacaaaaaccaagactaaaaataactctaaagatatatacttgccaacacaaagctcccttgaaccaaatcatcaaagccaaacactaaacacatctaaagaaacctcctatagtgaaacaatactacctctcacaaccaagtgaacctaagctactattccgacaagagagaatcaaggcaaagcatataaattcccatactactcccgaaaacggcgatatcgactcagcgacaatttaacgcctcgttagaagcctttgaaccgaccaaacctcgatcaggtcttaactgtagaaacaaggagcgaaacaaatcttcaaccggatgaaaccaatctcaaaagagagcagcacaagatcgaaccggaaagaaaccataaagaccaccactagaaccagggagcacgagtaaacaagtccaacaaccaaatagagatcaagctagtcaccagaaccgttacaaataaccaaaacacatgaacacaaagaggaagcatgagagacgagggagggaccgaggtaccgagaacggagccgttgttgctcagatccagtgaaggaagaaggccagagcctcctccggtgctccaaatgcaatgaaacacgtgaccagagacaaaacgaagatccacaccatgaggcagaggcgagaacgacgactccatcttcaccatctaccttaaggcatgtcgatttcggtctcatagaaccaaacctcgatagatctgatattcgatacaacccaatccacctcgccgaaatcaccacgcttcacaaccgaagaaagcaaagacaagagataagagaggggaccgacgctggcgctttaggagccaccacgcgccggtcagatctagccaagacg

SEQ ID NO: 195688 - DNA, 327 bp, Arabidopsis thaliana landsberg
agtcgtcaacgcctgacgtatcgtcagcggagctacgtcgaacctgtccgcaagcacttcgatcgccggcagcttcgcaccgaccgcccaggcacctgcctccatttcggcgcgcagcgtcgcggcgatctgcgtgtagagcggaatggcactttgccgtgagcgaagcatgttcgggccctggcaggctggtttaaaatatatagtcatatataaatatatatgtctagacttcatcctgacagcgtgacggccgaaaacaatgaaagcgtagcgatgatccaacctctggacctttttgtttatcgtcatgccagcgcacgcgag

SEQ ID NO: 195689 - DNA, 414 bp, Arabidopsis thaliana landsberg
atggccattgtacatggtgtaggcagtcccaacaatacccgcagccattttgatgcgcaggattatatggagagtggtacaccgttcagcaaaagcactcccagcgggtggctgaacagggctgtgggattgatggggcatgatgcttccccttttcaggcggtaagcattaccagtgccatgccgagaagtttgtatggcgataatgaatccatagccatcaacaacctgcaggaatttgcgatacagatgcgcggcaacccgtttgcatcgaacctcgcatctcaatcattcgagcaactgtacgaccagacatccagccagatcctcaataaaacaggaagggaaagttttgatgcgatgaagatgctgaacgtgaacaacatcaaaaactaccagcctgcacccggcgtg

SEQ ID NO: 195690 - DNA, 721 bp, Arabidopsis thaliana landsberg
caactcgattttatgcaagtggaagaggaaaagactacaatctatttggtaatgtgaaaccaggtgatgatgactttagaaaaacatgggagaaagaaatggaggatgatgatactctatggtcaggaagtgaagacgaaagcaatgataagacaaaacaagaaagcggaagaaaccgtcttgaaaaagagattaagaaagctagacaacaagctaaggatagcaccgatcaaattgatggagatgatagtgatgaattgtacagcgtttggtcaggaagtgatgaggaaaaaacgctgtggactggcgatgaaggtgatgatgacgacgatattccaacagagccacgcccgaacgaggcatctgataaatacttagataagttgtttgagtttgaggagaaaccaaagtacaggacaatctcagagttgttgaaatctgaaaatgaacctgaggagctttcacccggtaaaaaggcgaggaagcttgctgttgagaacgcgttgaagaaactgaataaagggcctgatgggcgctacacaaacgtgtgggaagtaatgagtgatgtcgacattctgattggagcatttgaaaacattatctcgggacctgagtatgaagagctaagaaaaggtggacccaagagcccgaacatgcagttcttcaaggatatacaaactcgaatgagagatccaaacttcaagttcacacctgaaataaa

SEQ ID NO: 195691 - DNA, 407 bp, Arabidopsis thaliana landsberg
cgtcaaacaacgtggtcgagtacgaggccttggttaatgggttgcgcatcgccgtcgagctaggggttcggcgcctcaacgctcgaggcgactcgcagctcgtcatcgaccaagtcatgaagaactcccaatgccgcgatcgaaaaatggaggcctattgcgacgaagttcggcgcttggaggataagttccacgggctggaactcaaccatgttgcttgatggtacaacgagactgcggatgagctggctaaaatagcctcggggcggacgatagttcccccggacgtcttctccagggacatatatcaaccctccgtgaaactggacgacgcgcccgaacccgacgagacctcggcccagcccgaggtaccctcgaccgccgagggtgaggccttgcgcatctag

SEQ ID NO: 195692 - DNA, 132 bp, Arabidopsis thaliana landsberg
atggcaaaagaaagaagcatatggtggggggtgttaatggggaggggaccacgtggcggttactgggaacgctgcaaactaaacgatcggtgtgagcgggaaagccgctttgtggggtccatcatccatcta

SEQ ID NO: 195693 - DNA, 196 bp, Arabidopsis thaliana landsberg
agccttttaaaagtaaccaacgccatgaatatcttccaagactggcctgagcctatagtccgtgtccaatccttatctgaaagcaacctcggagccataccaaatcgctacgtcaagcctctatctcagcgtccaaacataacccctcacaacaaacacaaccctcagaccaccaccatccccatcattgacttag

SEQ ID NO: 195694 - DNA, 306 bp, Arabidopsis thaliana landsberg
atgaccgcgtcgaaagaggtacgccgcgtcattcgatttcgtgtcctttcccttttcctctttctctctctctctcaacagggaccgggaaaggtggataccccgaaaaggacccttctccgtgaaggaaataggctccgagcctccctactgatcagaggttcgaaggctggcccctcggaggggttcaacagccgcctcagagcacatgggctccacacccactactggttagaggttcgatggccggccttcggagggttcaacggccgcctcaggccacttcggctccgcgcgcactactga

SEQ ID NO: 195695 - DNA, 1344 bp, Arabidopsis thaliana landsberg
atgccggttttcgctatgtcgtgtttcaagcttcccattactacttgtgaaaatttggagagtgcaatggcatctttttggtgggattcttgtgatcattcaaggaagattcattggcaaagttgggaaaggctgtgtttaccaaaagatagtggtggtttggggtttcgtgatatccagtctttcaaccaggctcttctagcgaagcaagcgtggaggctgcttcatttcccggattgcctcctttctaggttgttgaaaagtagatattttgatgctactgattttctggatgccgctttgagtcagagaccttcctttggttggagaagcattctttttggcagagagcttttgtctaaaggtcttcaaaaaagggtaggtgatggtgcctcttagtttgtatggatagatccctggatagatgataatggttttagggccccttggagaaaaaacctgatatatgatgtgactttaaaagttaaagccttgttaaaaccaagaacggggttttgggatgaagaggttcttcatgacttattcctgccagaagacattctcagaattaaagctattaaaccagtgatatctcaagcagattttttcgtttggaagttaaataaaagtggagatttttctgtcaagtctgcctattggttagcttatcaaacaaagagccaaaatctgagaagcgaagtctctatgcagccttctactctagggttgaaaactcaggtgtggaaccttcagactgatccaaagattaagatttttctttggaaggtgcttagtggtattcttccggttgccgagaacttgaatggtagaggaatgtcgttgataccacatgtcaggtctgtggtgagcttggggaatcgacgaatcataccttgtttctatgcccactctctagacaaatttgggctctttctgattatccttttcctcctgatggttttagtaacggctctatttattccaacatcaatcatctcttggagaacaaagataataaagaatggcctattaacctcaggaaaatttttccatggattttgtggaggatttggaaaaataggaactctttcatctttgaggggataagctacccagctactgatacagtgataaagattagggatgatgtggtggaatggtttgaagctcaatgcttagatggtgagggttctgcccttaatcctcccctgagtaatggtgttcattttgtaggcagtgtatcggagaatttatggattaaacctccagcgaattgggttaaatgtaacattggggcttcttggtaaaaaagaaacaattttgctggaggggcttgggttttaa

SEQ ID NO: 195696 - DNA, 52 bp, Arabidopsis thaliana landsberg
atgccacaagcgagttcttggtgtgtcaaagagacttccacgaacaattcag

SEQ ID NO: 195697 - DNA, 384 bp, Arabidopsis thaliana landsberg
gcattcgaggccgagccagaccgggactgggccggggaataccgcggatcgacgtactgcgcccagtacgtcacggccgcgtgccaggccggcccgtcaaccacggcggccgcccggcccgtgccgccaccgccgccgcggcccaggaatcggctggcccagctgtccaccctggtcaggcggtacctgtccgtcatcgcctcggaccgcacctacgtggcggtcctggcgctgctgccggtcatcctcggcataacggtccggtcggtaccggatcggctaggactggccggcaatcatgacaacttctacgcgtcggaggtgctgctgatcctggtcgtgggtgcctgcctcatcgggatagcgagcgcggtctgggagctg

SEQ ID NO: 195698 - DNA, 46 bp, Arabidopsis thaliana landsberg
ataagaacacacaaaacattcgaaacttctgatcctgtcttccaag

SEQ ID NO: 195699 - DNA, 334 bp, Arabidopsis thaliana landsberg
atggtgagcacacctgagatcgaccagatcgtgaccgccaacattacctgctcggcacctggtgcgcttacagtgacccaaacgcaaaataccgatgtgttcaaagcgtatgattgctcggtggacgtttcgtccttgtcagatgggtattattatgtgaccatcagcgctactgataatggggttccatcgcgtgtgtctacttcaacagtagtgatccacctgagcggatcaaccacggggatcaaagagcaaaaggccaacgatttcctgagtgtttacccaaatcctgccaatacttatatcaccataaaaggcagcgagaacatgcaac

SEQ ID NO: 195700 - DNA, 440 bp, Arabidopsis thaliana landsberg
atgattgctggcctggccactggaattcgggttggaaagattcttgacagggtatgccctctgctggattgccgtaccttcccgttaagctaataacattcaagctccatatcaatagccacacgatattaggaactgtcattgtcgtctttctccttatccagccattcattggcttttggcaccatcatcaatataagaaagcccaaaaagccggaagatggacacacgtccatatttggatcgggcggatatttcttctgcttggaattatcaacggcggtactggcctgaagctcgcagataacacaacaggaggaataatagcttacgccgtagttggtggcgtgtttggcgtggtatacttctcgatcgccgctgtgcatcagggaaaagtgatcctgggaaacgagccgacgcccgaaatgacccagacttaa

SEQ ID NO: 195701 - DNA, 194 bp, Arabidopsis thaliana landsberg
atctaatctcatccgctcaaacctcatcaaacggccataaggcatcttccacctggcaacacccaagcagcggcacccacaaccccgcggcggcaagaagcccaccggtggtcaccgacctccacaccccaagccccaaccaccgattcaatcatcgattcgtgcggagaagaacaatgcgaacacctgagggg

SEQ ID NO: 195702 - DNA, 309 bp, Arabidopsis thaliana landsberg
gcatttcatcgaacacttgtaatgcataatcataaacgttcagagataccgttgtacaataatgccccaatctacacactatggccatttccaacgccaaccatcagggattcactgtttttatccaaaatagctgacttcaacagtcaatattggtgtaccattgccaccgactcaccagatagaagaggagacgatcattctacaatttcgaacgcacgtgaaagattgcaaaccaaactcgattctgaactgaaccaaggaaatttaaaaaccaaaccagattctgaactgaaccaaggaaattaa

SEQ ID NO: 195703 - DNA, 287 bp, Arabidopsis thaliana landsberg
ccctttacgacggacggtccgggtacaagactacctaggcagcaccatatacggctggacagtcctgatataccttagaaccgttcggcccggtcgcgaaccgtccgaccccttactgcgggaccgtctgggtatgcatatgcagaaccaagagctgcacaatacacacagtccccacactcaccacaacaacattatggtgccccaccagcaacacattataaccatgccataccacctcatggacacagggcttaatactgttcgggcactagagagcctgagag

SEQ ID NO: 195704 - DNA, 335 bp, Arabidopsis thaliana landsberg
atgattccagcttccttaagcttgaaagtaaagtacctggggaacaagcattataccgacggtgataccagccatgagatcgagcttaaaatactcgctccatctgtaagttcgaatccatcggaaacaaggaaagagagtatcaatccaatcgacgagcctcatgcgcttgatcttcgccgtccatccggagaagatatcgtcgaaaggaatcgaaggaggacgagcttcattggaggtgtcaggatgctgaagcgggatgaccttgacggggcgggtctgacccggaggcttgagcgaagaagacgaaccggtccggatcttgaacaaggctg

SEQ ID NO: 195705 - DNA, 314 bp, Arabidopsis thaliana landsberg
atggcgcgcggccgaaaacaacggttcggccacgaccgcgaaaacgggctaagtccaagcgcgtggaaagacaccgaggctgctacgtaggtctcggttgaagggcacggtggaacggaggaaaaacgggaggagacgcaaggcaacaggcggcagggctgttcggccttgcgttttgggtgaaaacgaggggttcgccatggcgaacgggccaaaaacggatttttggccacggccgcgaaaacgggcacgtggaagggcacaggaccctcccgtggtcaccccgcgtgagacgtggaagttcgggtccaccc

SEQ ID NO: 195706 - DNA, 173 bp, Arabidopsis thaliana landsberg
aaaatcttggcaacgtctttcataagaccacgattggcacttgcgaaatcaatgaattcttggtacgagatgtatccatcgccatcggtatcaatctctgccatcatacgcttaatgtcctcgtgtgtgaccgagccaaggttcttgagagcatctccaagctcggccgctga

SEQ ID NO: 195707 - DNA, 105 bp, Arabidopsis thaliana landsberg
aaagagaccagcgtggaaaaaggcggtttcaacagcccggcagacggggaactgatcgattccctcggtttttgcaagaacattgccgtatccggcacttaccag

SEQ ID NO: 195708 - DNA, 173 bp, Arabidopsis thaliana landsberg
atggttttgttgagagtagcagcagagacgaaagaaggagcgtttagatacatcaattctccgttaactctctcttcgattcttcgatccatttcatcaacttcaacgtcaaactcatggtccgatgccatcacccatccccatgtgtccgcaaatgatggcacatgtgctgt

SEQ ID NO: 195709 - DNA, 288 bp, Arabidopsis thaliana landsberg
ttgaagattcatttgaggatgatcatggttttacggaagtttcagatttaggacagatttggggttggggatatggaggcgaaggtcaactaggattgggttcccggattaaaatggtgtcatctcctcatctaataccttgccttgaatcaattggatctggaaaagaaagatctttcatattacatcaaggaggaacaacaaccacgtctgctcaagcttctagagaacctggtctgtacatcaaggccatttcatgtggaggtcgtcatagcgcagcaattacag

SEQ ID NO: 195710 - DNA, 129 bp, Arabidopsis thaliana landsberg
gtcgttgatggtggtggtggttggattatgacggcggcggcgacggcggtcgttaaccgccgaggaatccagagtcgttcgatttatttaattcaacattttgcctctcctccaaatcccaaaccctaa

SEQ ID NO: 195711 - DNA, 128 bp, Arabidopsis thaliana landsberg
ggagggggtaatcaaagagaacgaggatcgccaccgaatccactccatcagcggccaccgcctcaacgaccgcgtcaagtttggatgtctgaccggaaaccggctcattggatcgaaggaatcagtct

SEQ ID NO: 195712 - DNA, 444 bp, Arabidopsis thaliana landsberg
atgtggggttcatacggtcgtgaggtggtccgggcgcgggccgaggctgcgagggctcaggtaacgttgttgtttgtttggcgtttgctggatgcggtctgtgcgtgtgtttgctgaatctgtgtgtcttgtcctacgcggagcgcggcgagcgggtggacgacttcggggctctgaacagcgcgctgccagacctggagcagaccctcgcggaggctgtgactggggtcgccctggagccaaccccggagaccgcagcgatcgtgacggctgcccccacatccgctgtggccggcgaagacctgcccccgaaggtggccgaaggcgcccctgatgcccccgcagctgctgtgccgagtgctgaagatccccgcggctggtgcgcggcggtagccatacggcggagccaacggcggaggtcccgcagcgtcagggccctcgcag

SEQ ID NO: 195713 - DNA, 363 bp, Arabidopsis thaliana landsberg
atgactgcttatgaacgctgggagatggccagttttgatgaggtgtccaacaccgagcgtgccaggcgcgaaaaggcacaggctgaagaaaatgcacgcactgtcagccatatcctgaaacaggtcaggcaggaagcctatgaagaaggttttaaaaccggctaccaggatggcctggtgcagggccaggcaagaatcgaggcagaaagcgcacaactgctgcagctgtctgccagttttcagcaggccttgtccatgcaggatgtgagcgtggccgaatctatcctgacgctggccctggaactctacaagaccatgctcaagagcaagttgcaggccgatagcgaggcaattattccggtg

SEQ ID NO: 195714 - DNA, 145 bp, Arabidopsis thaliana landsberg
aacaaattttgcaagtaagaagatggaagaagaagaagaaaaggaagaaggtcagagaactgtggagtgtttaagaggaagattacttgcagagaggcaagtttcaagatctgcaaaagaagaagcagagcttattactagaaag

SEQ ID NO: 195715 - DNA, 58 bp, Arabidopsis thaliana landsberg
atgcactcgatgcgcatgagcgagtccatgaagccacttcgtcggtatgtcgcgcagg

SEQ ID NO: 195716 - DNA, 182 bp, Arabidopsis thaliana landsberg
ttggatttcaatctagagtgtctgcttcaatgaatcaacggttaactaaggaagtaactaaagaggagatttataatgctattttttcaattaatggtgaaagtgctcttggtccagatgggtttacagcacttttctttcagaaatactggtcagttgtgaaggttcaagttattgaggag

SEQ ID NO: 195717 - DNA, 76 bp, Arabidopsis thaliana landsberg
atggccgatcaaccgctcaatgcgaagatggttgtggaggagatacaggtcggagtaagagttgaaacgcaaaatg

SEQ ID NO: 195718 - DNA, 103 bp, Arabidopsis thaliana landsberg
gagtgccaacagaagcggcattcgcctgaaccgcggttcgccccacagaggtaaaacttgcaggcagctggtacagaggctgactcccgtcagattcacccag

SEQ ID NO: 195719 - DNA, 1283 bp, Arabidopsis thaliana landsberg
atggtagagtcgtgtgtcgattctcattttgcgaattcgcgctctgagaagaacagaatcgagagatgtgtgaagggaaaggactctctgttgttgttactctgtgtggtaaatagctttggaagccattgcaccgttgtaaaagtgaaggagaagttcgatatccagagactgaagaagtggagattcggcggagaagctcgacggtgcgaaatgaccggagcagcattattttccggtactgcttttttgagttccaaatgaggttttaaggggctaggttattcttttttaacagagtttgttaaccgatttgtaccggccggtttattttgggttaagttttgatgcaattctgtacacaataaagtttaaatgcaattacattggggaaacttttcttttaatacgtgaattttcaaaaaatattatttaatatgtgagtgactatttaatacatgtgaaaatcgttgatggactatttcacacaaatttaatcatcgactataccaaaatttacacaacgttatatagcgttaaccgactgataacaactttaaattgtggccctttatatatatatcaactttacatgtgatcatttcatatatgagctaaatgttgactaactgtttgaaatatgagaatgcgttgatcatcctaaaaagacataccgttatctaagctagatattcggattttggttcggaattcgggtaggatagtttattatccgtttgaattttataactattccatgtcggattcgagtcgatttaggatccggtccaccaatcagcaagttttcacagatagccttccatttgctattttagtcgccagattcaacatagtccaccaaattcagcagttcaaaaaatatacaatagtccaccagataacatttagaccatttaggtttaaaaaaaaaaatacaatgcctatgagcagtggcattgaactttgtatttacacaggataatccaatctcaaaaatatattattatacagattttgttgaacatattttacaaaggaaactcccacttccttgagcttccattgatggtttcatgtagacttaagccaaagaatgtccagaagtgcgacgaatctcctggagatgagcagtggagacataaactgcattcacaagagagctgtttcttctcccatagaaaatgtaaacaaccactccgaggaacagccaaaccgatacacgagcccacgtcgcagctctaaaacattagcaaaacaaatgtatatcaacagtgaagtcatcg

SEQ ID NO: 195720 - DNA, 203 bp, Arabidopsis thaliana landsberg
ctagaaaagttctagtcccttacggcacaagcaagggtttgtttcttagtgccctacccaagggcaatgtaccaccttcgggtccaagcgacaagggtcacacttctcctccggatgataccgaccagcgtatggtaccagaaaactcgccggagatataccgtcgactagaatcagtccctagccccggcgtgggtcattag

SEQ ID NO: 195721 - DNA, 195 bp, Arabidopsis thaliana landsberg
atgatatctctaacaaaacttaatgatataaatagtgggttcgtggtgaacggagagctcatgattgttgctgaagtagaaacttttgaagctgttagcacatcacaagttgcagcggttcgtgatgatagtgaatggacacttcttggctattactcttcatctgaagaggacaaggatgatgtaactgttgta

SEQ ID NO: 195722 - DNA, 168 bp, Arabidopsis thaliana landsberg
tccaatgatggaaggtctgctccacatcaaaaagttccacgtttatctccaggatccagtgttggtgctgttattgttgatgttgagaacagcctcgagtctgatgtatgtattcctgtcctgcaaaggcattatgtgattgtaacttctttgtcactgtgtaattga

SEQ ID NO: 195723 - DNA, 419 bp, Arabidopsis thaliana landsberg
atgaggatccggtgccagtggtccctgaggatggtcagcagctccctcttgagttttttggtttgggtcaacctgtgccggctgtgggctgggatcttaatttcccgccagaagacaatgtccaagcccagccagcagacaacattcaaggatattgggaccaatggattgttaatgatccgcctgtgcagcagcctcatctggacctgccacctgacgagcaacaggtcagcaatccgcattcggacctgtcctcagatagttcttctggtcacattcatggtgctccgctgcagaatgggcagattcagaatgggcagattcctgatgatctggtggctgtggggccggtgcccaactttaatgcccccgccccctgccttgggcgacatccctatgattggaccccaggaggttga

SEQ ID NO: 195724 - DNA, 170 bp, Arabidopsis thaliana landsberg
atggcgccaccgctgatgggctctcgtcgtgcagtgcggccacagtggggtggaagaagagccattgaccgtaggatcatatctggatgctccagattagaagcacattatcagttcggctcctttaaatccagcccgttcatctcgaaacagaggggcatggatagatc

SEQ ID NO: 195725 - DNA, 402 bp, Arabidopsis thaliana landsberg
  unsure (1)..(402): unsure at all n locations
atgctgatcgccacgaacaggcccgtcacgatcacgcccatcagcatggcgccccaccgcgttgaagccttggttttggccccggatcagtccccccagcagaaatacccgacaggcgagaacaccggcagcatcgacggcaccaccttctcgcggatcgcggccttggtcagaaggtcaacggcgcgggcatagttgggcttggcggtgccctgcatgnnnnnnnnnnnnnnnnnnnnnnnnnnnnnnnnnnnnnnnnnnnnnnnnnnnnnnnnnnnnnnnnnnnnnnnnnnnnnnnnnnnnnnnnnnnnnnnnnnnnnnaacccgccgaacagcaggcccncgaccacccatggttcggacaggctgaaggacaacggcgtcaggccaacgaagaagccg

SEQ ID NO: 195726 - DNA, 265 bp, Arabidopsis thaliana landsberg
acggaaactgaagaaccaaaaacagagaagaccaacgacgaacccgaaaagaccatggaaaagagaagcagcctttcgttccatggcagagaagactcgatggatgacagcaacaagtccataatgagtacaagcgaagaagactccatgagtacaagcgggagttgtatgactggcccggaggatgatcctgaaatgaaacctttctactacagattcatgactcctgcgccttacaccaaacccaagatcgaaaaacaggaaa

SEQ ID NO: 195727 - DNA, 166 bp, Arabidopsis thaliana landsberg
gcatcggtgcgcagcacctcgggcgagcacacgaccgtgttcgagcgggtggttgagtcccgccgcaccatcagcaaaggggatgtagtgcggttggcggtgaagccgcagatcgtggcgcgcgtggactacttcacagttaaccaggtgaggcctcgtgtcgtcg

SEQ ID NO: 195728 - DNA, 191 bp, Arabidopsis thaliana landsberg
cggtggccgaagcgctgcgcgcggaaaagcaggtgttgatcctgttgccggaaatcgcgctgacactgcaattcctggatcgcttcgccgcgcgtttcggggtgcggcccgccgaatggcatagcgatctttcgggcaaggaacgccgccgcacctatcgcgccgtcatgaacggcgaagcacgggtggtg

SEQ ID NO: 195729 - DNA, 356 bp, Arabidopsis thaliana landsberg
  unsure (1)..(356): unsure at all n locations
atgctacaggatgatcaggtgcacgctaccgctgaaggcaacgcccaggtagcacagaatgtatcaccgnnnnnnnnnnnnnnnnnnnnnnnnnnnnnnnnnnnncacaagaagaaatgtccgtagtttcccagatgtgacacggccagcgggcgaagactggcgacgtgtcacaacctcatggcaccagccggagaaattcctctgcaacccgacgcgccgtcccatagagatcattctttatctcgcccgatggcaacaggtccgaaatcaccgccagagagtccgcccccgcatcgatcacgctgcggcaattttttcttgtaatgccgccgatcgcaaccagcggcttgtcg

SEQ ID NO: 195730 - DNA, 571 bp, Arabidopsis thaliana landsberg
gtgggttatggatattcccgtatttaccatggtcggtgagtggaaatgcaaagaaggagaatggaaatttgaacctgaggaaggcatctttggtcgttgtgtacgcgttcaggaaaccatgacgtacacggactttgtccgtacactccgagaggctttcagtttgaagtccatagagattaatcccataattagtccccggatgctgggacagatgttagtgatgatagattctgtctacattgacagtcaagtgagggtgggatacttttttttttattcgtggtgggtatccttctctcaacttgtttgtctcgttcattacaaccgtcaagactctcgagaatgatgtctctaggcctcatggtggcgatgctgaaagtgactgtgtgtgtgatagtgtttgaaatgttgatgaaaataatgaggtcgtagattagcaagacgacgttgaagacggtaaaacagatgaggatgaagatggggacaacaaagatggtgatggatatgatgattatcagggtgacgatggatctatgggggcaagtaccatcgaaaaatactataaatg

SEQ ID NO: 195731 - DNA, 386 bp, Arabidopsis thaliana landsberg
gtttacttactgagctgcaaacacttggcatcatgtctaggtcagcttttggatttgtctttacactctttcatggatatatttatacatgtttaactctgatatatatgctgcgccagctgtgtattaatggatactgactataggaaaactagatgtctaaagctttattgaaatgaacaatttttttttttcattttgttttttgaaaaacttatgagtgtcagtgtatgattgtaaaacttgacagggaggattttagtgatacacttcgagtacttgttgcaactgattgccacttgggctacatggagaaggatgaaattaggcggcatgattcatttaaggctttcgaagagatatgttctatagctgaggagaaacag

SEQ ID NO: 195732 - DNA, 411 bp, Arabidopsis thaliana landsberg
atgaagccgaagcggatttgcttgccggcctggactgtccgttcatccgcgacaccaagacccctacgatttaccactggccggcgccgcctgtcctggaacaaaaacgtcgttgcgttcggactggcatcgggttttatcgagccattggaatccaccagcatccacctggtgcaacgcggcatcgcgaccttgatgtccctttttcctacgcagggaatcaatcaggcggaagtggacctctacaacaagctgatggcaacggaatacgaggctgtcagggattttgtcatcctgcattacaagcaaacgcatcgcgacgacacaccattctggcgtcaggttcgggacatggatattccggaaagtcttgccaatcgcatggcggtctttaccaatatgggccgcctc

SEQ ID NO: 195733 - DNA, 212 bp, Arabidopsis thaliana landsberg
gaccagaagttggaaccggaaactgacgtggcagggaccccaagaactgtacacttttgtgatcttgtacttgatgatggacatgatcatgaggtggcgaaacgacgtccttttgtttgggtggcgagcttgtgttgaagacgttcgtggttcttgctccattgcagcaactcaaaaggacaagaagaagaacaagaataggaattgttctc

SEQ ID NO: 195734 - DNA, 140 bp, Arabidopsis thaliana landsberg
ggcttgaaattgaaggtttaatgttaccatttccggcaatgaacttgaagaagtctcgatcggaaaactcatcagttgcttcatctggaagtaagattgaggagcagactgagaaatcagctgaaccaacaaccattaag

SEQ ID NO: 195735 - DNA, 74 bp, Arabidopsis thaliana landsberg
gttcggagaatgcagatggagatgccgcctctgtacatgtacctgaagtttattctgtgaatccgagctactga

SEQ ID NO: 195736 - DNA, 161 bp, Arabidopsis thaliana landsberg
atctcattcccaaacatccctcacttttgggagtacatacctctgacaatgcgaccttggctttcctcgtatttaaaatcggacccgaccataaaaacgcaacgcacatcttgtcaatttcttttacccaggctttaggcagtcgaacgcagcgcacatga

SEQ ID NO: 195737 - DNA, 72 bp, Arabidopsis thaliana landsberg
atgttcacctcctacgtcaagaataaagattcccaagattcaataatattcggtgatgggaatcaaggcaag

SEQ ID NO: 195738 - DNA, 591 bp, Arabidopsis thaliana landsberg
atgaggtcctcaaggtatggctcgacccatcgtttataggcaccttcaccaatttcgttgatacatgtaaagtagctagtaagaacgccactaagctaagtgtggacgttttcgtaagatccaagattagggttttctcctcctaaagcggatcatcctatcttttgccaactccatcatctcttcaaatagattggtgtcttctttcacaccaagcatctcattcccctcccccccaggtggtttgttttctccctcccccccattaaagccatgtcaatcctccgcacggaattcttcaaaacgatgatcaataactcacgacgtctcatctccgagagtggtgaggaaaccgtcttaagctccaacaaaaagttttgacatgactgttcatctcattctttgctaacaccaataaccgttgttatcatcaggatcgaaaaagaaaaaaacttaaaccaacatttttgaaagttttttttttatttctttcgtctctctttagaatttagattatgtgaactgaggaaagaggagagagctatggtgtcttttatacaagcaaaacaactaaatcaatttaccctttaa

SEQ ID NO: 195739 - DNA, 282 bp, Arabidopsis thaliana landsberg
gatcgttggcttgcccaagatcgttgccttgcccgaaatcgttgccttgcccaggattgttgccttgcccaaaatcattgcctagcccgacatcgttgccttgccaggatcgttgccttgcccagaatcgttgccttgcccaggatcgttgccttacccgaaatcattgcctaccccgacatcattgcctaccccgacatcgttgccttgcccagaatcgttgccttgctcaggatcgttgccttgtccgaaatcattgcctaccccgacatcattgcctag

SEQ ID NO: 195740 - DNA, 967 bp, Arabidopsis thaliana landsberg
atgggcctaataaaacttcattatgggccatctagtgcaaacccgtttggaaaaagtactttacggtgagatcaaaatcgctcttctcatattattgtacgtacaccaagctaagctaacataatattttatcaagaatcttttttctttatccttttatcccttgaaataatatcttcaagcgtgatccaataaaatctcacaacaaaaaccgaaacacgtatacaaaagatacatttcaagacttaatccattagctgttctttccggcttttcggaatttgactccatcaaaaatgagaaaccaaaatacaattcaaaacgagaaagcaaataaaatgtgacatgtgatatatgcatgtgatatcccaagagcttggcgataaatacaactcagttagctacattatgatattatcagggactagtgtccaaactatatattattaaaaatttgatttataccaccaatcccccgatcccatcgagagatttaatttgatcagacaataatcgtgtattcattctcttatattattgcactaagagctcacatgagctgctagctgtatatcaattagaatctacttgattattgttaaaaaattaggagcaagagatcaaatcttatatatctataactagtcgtagtagatggagttttgggaagtgacccggtaactaatagtatggagaacgaggtgggatggatgaatgaagcgtcgaaggatagcagcaacaatggtgaatctttcattgaaatacaaatcaacaaagcagtcagaaccacaggattgagcatctcttcttcgccatctcccgagaacgaaatgcagacgacgacagcaatcttctcatcggccactagttgcttctcagcatacagcagcgtgacgaggttgatgatgaaagtggggtgtttgagtatagtgggagtcataagagagaaagtaaacgtgggagagag

SEQ ID NO: 195741 - DNA, 173 bp, Arabidopsis thaliana landsberg
gttatggatatccttgggcctagtaggtcctgctttgtatccctacaatgaaaacatcgaaataaatgtcatgattatgccgtattggtttaaccaactatttttccattctatttgcaatcccatcgtcgaactcatgattgacaaggcttgtcaaaaagatacacataaac

SEQ ID NO: 195742 - DNA, 131 bp, Arabidopsis thaliana landsberg
aggataaactaattaccatgatgccgaagccggagacgtttgcgaaagcagtggcaagagcgacaccagacagctggagttcaccgcagtggccggcgaccatgaccgagatcacgggcaatagatattga

SEQ ID NO: 195743 - DNA, 97 bp, Arabidopsis thaliana landsberg
atggagagtcgacgcaggacccgagttagcagcgcacgcccccccccctttcagtgcgtcaatagagtcttgcatgtcttaaatcgcatctctttag

SEQ ID NO: 195744 - DNA, 294 bp, Arabidopsis thaliana landsberg
ggcgcatcaccgatcccgcgatgttcatggtggccgacgccgcccttgaagcgccaggtgatgtcgctctggacggcggatcacgcgcgtctcgccaagaccttcgaggacaaggtggatgcgttcctgagcgacgcgcaggtcggcatggccttcctgacgccgcagctttatcgcatcgagaccgaagtctacatgaaccggtatccgagcttcgatatctcgcgcttcttctcggtcgatacgaccggggacatgtgggatatcggcacgctggtctattccatggaccag

SEQ ID NO: 195745 - DNA, 65 bp, Arabidopsis thaliana landsberg
ggaactccttggatttttggcaaacgttttggatggtgagtgctttcttcgtctctgcatcaatg

SEQ ID NO: 195746 - DNA, 100 bp, Arabidopsis thaliana landsberg
atgtggacaagaatggattataactattttgtgtcaaaagaaaagaaaaacaattttgaagaggctaaacaacgacctgaccttatggatgatgaccaca

SEQ ID NO: 195747 - DNA, 233 bp, Arabidopsis thaliana landsberg
gtctcgactggtatgagtatcgctatgcagatatatgtcctttgggctttacaaactgtttcttgtatgtatttttatgtttgatgacagctaactttggttcttgttaatactactctggttcaaaatcttataataggcaatctgtcatcacagtacgccgaccaacttctggagaaaagagtgagatctcgcttttcacacagaaaatttttgtttcttcctccttccag

SEQ ID NO: 195748 - DNA, 194 bp, Arabidopsis thaliana landsberg
atggctggtaaagcacaaacaatcggtaaccttttcgaatgactcgtaactttgcagcagtcccatttcgcctccacatgtattcgttccccttaatcgtcccgttccgcaacaagccttctttccctcctttaacccttcaaaacaaaatacaaaacgattcaaaggtgattctttcggaaagagaagtgtga

SEQ ID NO: 195749 - DNA, 172 bp, Arabidopsis thaliana landsberg
taaatttagggatggaaacgggaattttccgtcgagttttggctcctcgtacccgttcctgtcgagttttggctcctcatacccgttcctgcgacaaaaaatttcaccacaggatccacatgaacttttgcgggtggtatttcttcttcacctccgacccccgcggggataa

SEQ ID NO: 195750 - DNA, 542 bp, Arabidopsis thaliana landsberg
ctgcacgagaaggatcaacttccatggcagctttccaagtttgcttgcaggtttggttagctacttcacttcttgcagacgggtacgccgtagctggccaggtttttagataatgatgtctctaacattgcatccttttacgattaagcgcgtggtttaaagttttaacaaatgtcttttcctttaggcaatactagcgagcgcgtttgccaaaaaagactacgaaagagcagcagctaccgcctctcgtgtactgcaggcacacacaatttatgcatttgtgtttgcgtttacattatgtttacgattttggatttatatgaagaaaatatacacagaaagtatacataataggtaattcaaaggcaaacaaacaatggaggcctatgtgtactttagcttataaagattcgattctagatcaatttaaagctaaagaactaaatcttgtgacagttgggattggttctcggttttgtacttgcggttatacttggagcaggattgcattttggagcaagagtgtttacaaaagacgataa

SEQ ID NO: 195751 - DNA, 255 bp, Arabidopsis thaliana landsberg
attcgttgtccacgtcagtcgataccaaggtggtcattacttccaactcatggttctccagcgctggccaggccaaaagttggttgatcaccaaatcactcgacctgcttgctggaacgggtaccattaagaacaaatcagcttctttccagacacgtgattactttgatggttaccaggtatggctgtggaattccgacaacgcctttggttcattctcaacagtactggccgaggccggtgaatacactgcag

SEQ ID NO: 195752 - DNA, 363 bp, Arabidopsis thaliana landsberg
atgtctaaccctcgctctgccaaaggcctttctttcagccgccgatttaccaaagaaggggtaagtcccttcgatatgttcgagtatgattaccgcgacagcgtgatcaagaacccgaatggtgaaaaagtttttgaaatgaacaacgtggaagtgcctaaacagtggagccagattgccaccgacatcctggcccagaaatacttccgcaaggcaggcgtgccccagcccgatggctctgtgggccgcgaaacgagcgtaaaacaggtagcacaccgtatggccaattgctggcgcgtatggggcgagcggtatggctatttaaaatcatccaaagatgcggaggtgttttatgatgagctg

SEQ ID NO: 195753 - DNA, 127 bp, Arabidopsis thaliana landsberg
atgtccgtccaacacatcgtaaatttaatagctctcacagttcatgtgaagattccaagcatgaatcgaagaagagttttacaatgtatcgtcttgatctacagacatcgcgtcgctccgattcatg

SEQ ID NO: 195754 - DNA, 126 bp, Arabidopsis thaliana landsberg
atggttctgcagcccgatcgaaaccatattcatgctgatggtaaagatttatcattcgtcaccattaaagttttggatgcaaaagggaacctggttcctcatgccgataacctgataaattttaag

SEQ ID NO: 195755 - DNA, 772 bp, Arabidopsis thaliana landsberg
  unsure (1)..(772): unsure at all n locations
atggctattgaaggcactcagatttcttctcttaaatctggttggagtagtcaagatgatcaagttttcgctgaagctctcatttttctttcgggtgggactgctactatctgttttcatagtactggtcatggcgatcctgcgattttgagtatcgagnnnnnnnnnnnnnnnnnnnnnnnnnnnngctttggtgaaggttggggtcaaggagtgattttaagaactgccactaggttgacttgtggtactgggaagtctaggtttgatgaggattatagaggggatcattggggtggtgataggttttggaatcgtatgagatcttttggtaagagtgctgattctcctagatcaactgaggaaactattaagaaggcttcagtttcaccaaatttttatccagaaggactttatcagtctgcgttggttagtactgacgaccaacctgatttaacgtatagcttggatgtggaacccaacagaaattactctgtatggttgcactttgcagagattgataatactatcactgctgaaggaaaaagggtgtttgatgttgtgataaatggagatactttctttgaagatgtggatatcataaagatgagtggtggtcgttatgcagcacttgttcttaatgcaacagtgactgtgagtggaagaaccttaactgtcgttctacaacccaaggcaggtggtcatgctattatcaatgccattgaggtctttgaaatcataaccgcggagtttaaaacattacgggatgaag

SEQ ID NO: 195756 - DNA, 137 bp, Arabidopsis thaliana landsberg
atgttctggcttaatgtcttgggtaagatctttctagttgtacgggccataaaatccagtatcacacgcttttcatggccatgacccatgaggccggtgatcgggttaccttgtgccgtccgtttgactttgattga

SEQ ID NO: 195757 - DNA, 90 bp, Arabidopsis thaliana landsberg
ctaaaggacccgccgttccaaaccttctatggtcgtggctgctcatttgtaactggaaagagacttgtgaaacagaggaacaagaagtag

SEQ ID NO: 195758 - DNA, 445 bp, Arabidopsis thaliana landsberg
atgatcaaagttaagcgaaagactgagttaagcatattgttggatcagctgtatcttcttactggattagatgtagatgatcggagatcaaaggttagaattttcggtaggtttccttcagtttttcaacaacaatcaatgcttcagtttctacttttgcctgtggtgaacgactctagtttggagacaatgcttgaagtcccaagcaaacatccttctattaaaaatgtggaactgtatttggaagtgaaatctgatggggttgttgagtctgctgcttgttcgccgttgatggccaatcctggtaattcctcgaaaagacagaggatggatgtacctcttaagttagagaaaggtaacagtaacgggtggattgaagatgaagatgaagaagatgttgatataggaaacggtggagatggtgacatgacagataaaaatccag

SEQ ID NO: 195759 - DNA, 842 bp, Arabidopsis thaliana landsberg
atggggatctgtgcggacctatctctcattctacagctgcaagaagaaggtacatatttgtgctcattgatgattgttccaggtacatgtggttactgcttttgagagagaaaagcgaagcatttgaaaagtttaaaggtttcaaaactttggtagaacaagaaactggagctaaaatcaagacactgagaacagatagaggaggagaattcatgtctcaagagtttcaagatttttgtgaaaaataaggagttaatagacatcttactgcaccatatacacctcagcacaacggagtagtcgagaggcgccacatgaccttacttgagatgactagaagcatcatgaagcatatgaatgtaccgaattatctgtggggagaggcaattaggcattcgacttacttaataaacagagtgggaacaaaaacactgaagaatcaaacaccctatgaagctttgaagaataaaaagccaaacgttgatcatttaagggtttttggttgtgtcagttttgcgaaaatcgaagctcaacacctaaagaaattggatgacagatcaaagatggttgtataccttggaatagaacccggctcaaaagcgtatagactcctcgatccaacaaatcgaagaatcactgtgagcagggacgtggtgtttgatgaaagcagaagttggtcttggaacataacagatggagaagctcacaatgaaccaggatcgttcacagtacaacttcgaaggcttggaaccgatgaggacaaagaagatgaaacagggcagaacggtaatgacgcagatgataatgacagtggtaaccatgaggatgaagaagatacgtag

SEQ ID NO: 195760 - DNA, 198 bp, Arabidopsis thaliana landsberg
aaatcaatggcggagttagaagcaaaagtgagcgagagtgtaatcgaagcgtgtacaagaacagcctcagtgagaaaatgtgtcttcacatcatctctcttagcctgcgcttggcaaaaaaatccctgtaatagtcttgaccactctgttatcaatgaagaaagctggagcgatgaacaactctgcatcgataataag

SEQ ID NO: 195761 - DNA, 177 bp, Arabidopsis thaliana landsberg
ggcttgattcttagtaatgccttgagggcacaaaagaatactgaagatgagagttgtataatggctcttaacaaccttcggtccgaggtgattgaactaagaaatgaaggtctagagaaagataaaattttgatttcattggtaaacaaagtaaaggaagatgaagctaattattaa

SEQ ID NO: 195762 - DNA, 43 bp, Arabidopsis thaliana landsberg
atgccacgtccaaaatgtcgatactaccacacggttaaaatag

SEQ ID NO: 195763 - DNA, 122 bp, Arabidopsis thaliana landsberg
atgccggcgctgaaggacaaggcggccgtgcaggcgagcccgctgcagaccaggagccgtgacggctgggacgtcaggatttggggcattcatgatttccaatttttcactgctcagaaaac

SEQ ID NO: 195764 - DNA, 417 bp, Arabidopsis thaliana landsberg
  unsure (1)..(417): unsure at all n locations
gccattgccgcctgaagcacagagagcaccgtgaggagaaacagcaaaagggaaggtggtgagacccgccgtggggagatcacgatttctgggaggatttgaccatcctggggtaccnnnnnnnnnnnnnnnnnnnnnnnnnnnnnnnnnnnagtccctattggcgagagccccgtctcctggacgccaatttcttgccggtggcgggcttcctccccatgtcgtcgtgtcgcatggacagttttcaccatagctcgatcactcgtaagtcaaccaccaacattttccacataccctcctctctattttctgcaaaaccatgcgtaggttggggtagctggggccgactaaccaggttccaggtgatggcgccgtcgcaacacttggttcttggtcgcatgtctgaccggaatgaag

SEQ ID NO: 195765 - DNA, 92 bp, Arabidopsis thaliana landsberg
gcaattcgtcgaacaggttatggacaataggagtatccggagacaaaacagaggacgtgaagtgtcgctcatgttttctcttactgaagtaa

SEQ ID NO: 195766 - DNA, 38 bp, Arabidopsis thaliana landsberg
atggctggccaacccggtcgtggtcaaaaagaagaacg

SEQ ID NO: 195767 - DNA, 173 bp, Arabidopsis thaliana landsberg
tcggtgcatctgaaggtacactacgaagctccctgattgatagcttcggcattgcttctgttttgatcttccgaaggtgtttcttctcacaggaccttcgacgacgaagcggacccccaacagtagccccttcacggtgccggatcatttttcgtgatgagctcgacccgtga

SEQ ID NO: 195768 - DNA, 2197 bp, Arabidopsis thaliana landsberg
atgattgatattttaaaaaagttccaaagtaagttatgaaagcaatgattttgaaacctaaacatctatatgtactttatatcacaaatatgggtgcttatcagtgatttatatcaaaagattgaatcaaaatatgttgatttttaaaattttgtcttgtaacgtttatatagttgtcactaagtagtcacatttggcaacgtatctataacatatttgcgactgtttggctgcaagtgtcacaaaacggttgctgtttgcaacttatttgcgaccaaaataatatatagtcgcactttgcaactgattacctacgtattaacaactctcgtttttgtatttcaatatttttaagtttttgtctatatatatgttttcttaatgtatagttactttaatgtgattgaaatttgagaggaaaacgtaaccaagctcttcaattctgaattttacaaagtaaactttctaaactttcttatttatatgaagagttacatgttctttgattaacatgattgatattttaaaaaagttccaaagtaagttatgaaagcaattattttgacacgtaaacatctatatgtactttatatcacaaatatgggtggttatcagcgatttatatcaaaagattgaatcaaaatatgttgatttttaatattttgtcttgtaacgtttatatagttgtcactaagtagtcacatttggcaacgtatctataacatatttgcgactgtttggctgcaagtgtcacaaaacggttgctgtttgcaacttatttgcgaccaaaataatatatagtcgcactttgcaactgattacctacatattaacaactctcgtttttgtatttcaatatttttaagtttttgtctatatatatgttttcttaatgtgtagttactttaatgtgattgaaatttgagagaaaaacataaccacgctcttcaattctgaattttacaaagtaaactttctaaactttctaatctatatgaagagttacatgttctttgattaacatgattgatattttaagaaagttccaaaataagttatgaaagcaataattttgaaacctaaacatctatatgtactttatatcacaaatatgggtgcttatcagtgatttatatcaaaagattgaatcaaaatatgttgatttttataatatcgtcttgtaacgtttctatagttgtcactaagtagtcacatttggcaacgtatctgtaacatatttgcgactgtctggctgcaagtgtcacaaaacggtcgctctttgcaacttatttgcgaccaaaataatatatagtcgcactttgcaactgattacctacatattaacaactctcgtttttgtagttcaatatttttaagtttttgtctatatatatgttttcttaatgtgtagttactttaatgtgattgaaattagagagaaaaacataaccacgctcttcaattctgaattttacaaagtaaactttctaaactttctaatctatatgaagagttacatgttctttgattaacatgattgatattttaaaaaagttccaaaataagttatgaaagcaatgattttgaaacctaaacatgtatatgtactttatatcacaaatatgggtgcttatcagtgatttatatcaaaagattggatcaaaatatgttgatttttataatttcgtcttgtgacgtttaaataattgtcactaagtagtcacatttggcaacgtatctgtaacatatttgcgactgtttgtttgcatcactatgtgtgactaatttccttttctattgtgactaatttctgcctgtttttgcaaccaatgcgcaacagttttaaaaatttattaaaattttatttatcttcgcgttattattttgcgaccattgagggactaaatagtgacgattgttttcttttaagtggaaataaacctctcgactttctcatttatcgattcatttctaaaatctaaggttttcatttctctcatctctctcgaatccaagccaaaatacttctagaatccttctctttctcttcgatttctctccattctcttctcaatttctcttcttctgttctcaatttctagatctagggtttctcttcttctcttctcaattcaacctggatttggctttatggctggtggtggtagaggcaaatcaacacgcagtcgaggtagag

SEQ ID NO: 195769 - DNA, 119 bp, Arabidopsis thaliana landsberg
gccgacaggccgatggaccgatggactggtgggtcgactggtcgatgggccgtcacaccaatgggctgacggacctatcctccaaggacatgggccacggttatggagtccatccataa

SEQ ID NO: 195770 - DNA, 99 bp, Arabidopsis thaliana landsberg
atggtgaactgcgaaggtgcactaggtcttctccgttgccgcgtacgtaatagagtgccttattcattgaccccacgtcttccctaggtagtacgctag

SEQ ID NO: 195771 - DNA, 96 bp, Arabidopsis thaliana landsberg
tccaacttcagctaccagaactcctgcctcagccacatcctgatcggtgggggatttggtccagcttggagtgcgaacatccggttgtctccctga

SEQ ID NO: 195772 - DNA, 180 bp, Arabidopsis thaliana landsberg
atggcgaatttcatggtgtatatggtaagagagtatcatatggaccaagttcaagctgtcactcttatcaacacttggtctgctctcaccaactttgctcctatcatcggagctttcatctccgactcctacaccggaaaatttaataccattgtcttcggttccatcgctgagttgttg

SEQ ID NO: 195773 - DNA, 576 bp, Arabidopsis thaliana landsberg
atgtttctgatttcatcaagggaagaagaagatcttggaaacctgtatgatgagacgaacaataccataaacagcgaggagtcagaaattgaaacggggtatgcagatttgtctccacctggttctcctgatgttcaagaaagacagtgtttggatggttgcccttctccaagagcggaaaaccactactgtgacagacctgacagagatattaaagatcttgaagatgagaatgtgtactttacaaatgatcatcaaaaacctgttcaccagaacgcaagatattggaaagaagtgcagtctgataatgctttgaggtggtcagataaacgcacatattcagataatgcttcttttgtcagtaggtcagaggcaagataccgtaatgatagattagaagtgccttcaaggggattcaatgggtcaaacagacagttaagagtgaatgcttcaaagactggtggcctgaatggtatcaagtctcatgagaagtttcaatgttgcgacaacagaatcagtgagaggtttgacttcagttcttgcagttgcaaaccaagttgtgaatatcgggcaaaa

SEQ ID NO: 195774 - DNA, 448 bp, Arabidopsis thaliana landsberg
atgggtgcatacctcatcaaagcttttcataaacggaacaaagctgagctgatccattgcataactcggaagcccagctgcaaccgccgcagccgcagctgctacggccataacgccaccaccaacgccgcctatttcatcggatcggttcggaggattaacattaataatttctctagacgaagaacaactcccaccactagtagtcccactatctctcctcatatgatactctccgccgcctccgccgctactcgcttcaccgccgccaccacctatagcgttcaagctcgatgtagaagacgaccagttgcattgcctaggctgagtttgataaaagatcttagacacaacaagttctccttctttctcttcctcatgtgtccccaaatgatattgatgcattacccaattggttttctccggttttcgattcttaccaaaattg

SEQ ID NO: 195775 - DNA, 256 bp, Arabidopsis thaliana landsberg
atgatgagttttctggatttggccgggtactatcgaagatttgtgaaagggtttgcgagcatggctcaacccatgactagacttaccagcaaggacactaagttccaatggtcggatgagtacgaaaagagtttcgccgacttgaagttgatgttaacaagtgctccggtgctaaccttgccgcaagtggatgagccatacatggtgtacacggacgcatcaataatgggattaggatgtgtccttatgcaaaagg

SEQ ID NO: 195776 - DNA, 450 bp, Arabidopsis thaliana landsberg
atgctcgacgtagcccgtcattttttcactgtggcacaggtcaaaaaagtgatcgatatcatgtcttcctacaagctcaataattttcactggcacctgactgacggacagggatggaggatcgaaatcaagagatatccaaagcttactgaagtcgggggaaccaggatgcagacctcattcggagggaacagagactggccggacgaggttccgtattccggcttttatacgcaggatgagatccgggatgtggtacagtatgcctcagaacgctttatcaatatcatccctgagattgaaatgcccgctcattctgatgctgctttaagagcatacccggaattaaaatgtatacctgcgcccggctccgctaatccgaatcgcgggaacagtatttattgccctacagaagaaacttttactttccttgaaggggtgctgaccgag

SEQ ID NO: 195777 - DNA, 132 bp, Arabidopsis thaliana landsberg
agactatagtccatcggaatataaatccgacgaacattttcattgatgagaattggacggcgaagctttctgatttctggttctgtgttgcaataccagagggggaattgtatgtagaagatgatgtgaaag

SEQ ID NO: 195778 - DNA, 822 bp, Arabidopsis thaliana landsberg
atgaaaataaaatttgggagcatcgaaagaagtgaaggtgaggataaaagcaaacaaaagaatgttagttgtgattttggaatgcctccaaacactcctcacggggatctttatgaacaaatacccacacatatatcctcctctctctcttcacctattcctcatctctccttgtcctctctatcgcgctctctttcgttctctctctatatgtatatgtatttgcaacgccgtatacaacgcgtatatgtggatctatgcattagcaacataaatcccatttttgaacaaacaccaatgtaaagtcacatctttcaaaacacatataaaggttgatgcctaacaatttgccttcacattacatattgaatgatttgatggatcaatctaaaaaacatatctatttagatcgagttactcgtcaaacttatatatgtatgcatatacgaataaatttgtatatttaagcgtatagatatatgtagaagtatataactttggatagattagcaatggtataggatatagaagattgtatatattggagacggacaaataaacgtacccaccatttcacatgtgtgccaattaatcatcacaacacaacaacactcacacacaagtcccgttgcttcatcaaaccccttttctttcacgtctctagcttcattcatttgattttattttactatttcatctcatcttcctcctcctatacgatctgtttcttttcttttctttaatttagggtttggtgcaaaacccttgattgtttccacctctcgtctactacatgatccatatatgtgtatggttcgatag

SEQ ID NO: 195779 - DNA, 1172 bp, Arabidopsis thaliana landsberg
atattatagatcaggtcggttggctgagatgagcgatgtctacagttttgggatagtattattagagatactaacaaaccaacgtgtgattgaccaaacccgcgaaaagtctcacatagcagaatggacggcatttatgctaaacagaggagatattacaagaatcatggatcctaaccttaatggtgattacaactctcgttcagtctggagagctcttgaattggctatgttgtgtgcaaacccttcatcagaaaaacgaccaagcatgtcccatgttgttgtcgaactaaaagagtgtcttatgtctgaaaactcactcagaagtaagaataatgacatggactcacaaaattcccttgaggtaagcatgagttttgatgccaaggctacccctactgcaaggtagtatttttgcgaggagcattggtcgcatcagtgttttcctgctatgggtatttctccttgtctattgagtgcttcaatttttgttttgatagattataactaaacaagagatgatacatatgtagcactcttttgatctcgcactctctcttttattttaaacttgttgtttggaatctgcgcaagtacttatttatccgctattatgttctgaaattagatatgaaaatttccacttgaaattacttattcgatggctttggcctttacgcacgatgaaccacagggacaatgcacatactggccggtaagatacttacattaaagatacaacgagttttatgatcaatgaagaaatgttcgatcagaaagataaacaaaaggagagtacttgacctaattaattgttttggttttcattactaatagaacctacgatgtattgttgccttctttacttttttgggcagcaatgcctttttctaataaatttttgtttctctttctcccagcccccacctcaaactatactcatttgttcctcacacgttttcagaggtgtgacatgttttcacttttccgaggcgtgacttggtattctcttttgcttgaaatgtccaaatgagtttcgtgagcacattgcttataagcttcaattagggttcatatctttcttgcgaacttaagaagatatggagagtcctttaaaaggtaccgatcgatattagtttcctctaaaattcacaatgttcaagctcaagaag

SEQ ID NO: 195780 - DNA, 448 bp, Arabidopsis thaliana landsberg
atggcaaaatcagaaaacgacaaaaattctccagagaaacaaacatggagcacatgggaagagcttctcctcgcctgcgccgtacaccgtcacggtaccgaatcatggaactctgtttccgctgaaatccagaaactgagtcccaacctctgttccctcaccgcctccgcttgccgccacaagtacttcgacctcaaaagccggttcactcaagagctggccgtaccggaatccgtcgctgcgatctcaaccgctccttggctagaggagttaaggaagctccgcgtcgatgagctccgtcgcgaagttgaacagtacgatttatccatctccacgttgcagtcgaaggtgaagcaattggaagaagagagagagatgagtttcattaaaccggacacggaaaccgagaatttagatctagagaggaagaaagagcgtagcgattccg

SEQ ID NO: 195781 - DNA, 92 bp, Arabidopsis thaliana landsberg
gttttactactatcattccggaaaccgcctcgagggaaagaaaacatcacgactgggatggacagaataaacaagtgctaaatgtagagtaa

SEQ ID NO: 195782 - DNA, 439 bp, Arabidopsis thaliana landsberg
gcgttcggcggtgaaaacgagcccgggccaagtacgcactggccgtcacatcatgggagctgctgatgctagatggtagaatctttcatcgctagtgagaagcagtctgggttccggacttgtgacttgagtcctgtctatatggatctatggcactggagggtgcggccgttgacgcatctttaccggttgattaaatccaaattggcgatcgatcttctcaaccttgcaatgaatctaagggaatagatgaagcgatgtcgttcaattctatccttcccgaaagagatgcacaagcagaagggctgaaacagattgtgatacaccaaaaagcgatggactaagagctttagaagcctttcgttggaggcctgacattgagccgtcaacggttcgaaacacaaaagcatcaaacacatactttccctgcgacatgtga

SEQ ID NO: 195783 - DNA, 405 bp, Arabidopsis thaliana landsberg
aaggagactgatagtgaggaagttccagaagaaaaatcatttgttgatgctgctcctcctgcgtctgatgaggctccaatccaagattctgtcaaaccaacatctgatgaggctccaatccaagattctgtcaaaccaaaatctgatgaggctgctccatcccaagactcagctaaaccagatgtggctgcttcttcatcaacgcaacagccatctgaagaggatttgggatgggacgagatcgaggatatgagtagcatagatggtaaggaaacgagtcggtctggtggtagtccaaacagagctgagctgcgtaaacgtctgagtgctgcagaggaagatgaagatttaagttgggacattgatgaagatgacgaagaagaatcatcatcatccaaagcttaa

SEQ ID NO: 195784 - DNA, 170 bp, Arabidopsis thaliana landsberg
atgtcctccgcgcacaccgagaccgaaatcaagctcctgctgcgcgatcaggtgtcgtttcagcgcctgctggacgcgctctcgtcgggctcggtcgccggcgtcgcgccgcacacctcgcatcgctccacgtactcggacgtgtactacgacacgccgcaacgagatat

SEQ ID NO: 195785 - DNA, 99 bp, Arabidopsis thaliana landsberg
atgagcaacatcggcggaggagactataaggactggtgtacggccaaaatgaaggagcatgagtggtccatatcggagactgagggaacgaagagatcg

SEQ ID NO: 195786 - DNA, 150 bp, Arabidopsis thaliana landsberg
ttacatcaagctaaatcaatgttaagtgaagatccaagcattcatggaggttggaaatatgatcatgttcggtgtattattaagaattttgaaaaatttaaagatggtgccactccttctaaacgtgtatcaatccaatgttattattga

SEQ ID NO: 195787 - DNA, 84 bp, Arabidopsis thaliana landsberg
gacattttattgatctttctgtttggtaaggttcaaatgcagaggcgagaacgaggatcgtaagaatggagcgagcaaaaacag

SEQ ID NO: 195788 - DNA, 63 bp, Arabidopsis thaliana landsberg
aatcccggtacgatatttagtgatacaacgattaacagaaccggaagttcggttcagtacatg

SEQ ID NO: 195789 - DNA, 164 bp, Arabidopsis thaliana landsberg
taaagcaaaaggaaggtggcctgcgtaatagtttagttaaaaatgactgttccaagaaatatacgtaccagcagtctttgaatgatgccattatggtagaccatttggtgggacacgtagctggacgagtagtagtttgtgaagaatttgctcagcgtgtcgct

SEQ ID NO: 195790 - DNA, 50 bp, Arabidopsis thaliana landsberg
agcttagactctatgtcactatgaaacgacttgtcaacaaagcattttga

SEQ ID NO: 195791 - DNA, 57 bp, Arabidopsis thaliana landsberg
caaaccctagccgtcaccaagagctgcctccttgctgccgtacctcttgaagcttga

SEQ ID NO: 195792 - DNA, 378 bp, Arabidopsis thaliana landsberg
atggtggatagaattaccacgtcatcaactttagatctatcagtacccatgagatcatttgagagcaatgccacgtctcaattttctagggatggttcttttgggttccctgatagacaaaagcctacgtggagaaaggaagatattgagagtggaagcaattcaaggtttattccacaaaatttggagaatgttccacatagcccacaggaagaattctttgggacagctggatatctcagtgccccttcctacttcaaaccaggattcccggagcattcaattgatcagagttggagaattcctggagatggaaggacgcatggtaggaactatggaatggaatctgaatctcgtgaaaatttggagagcaatatg

SEQ ID NO: 195793 - DNA, 274 bp, Arabidopsis thaliana landsberg
accctgcttcttcttcttcgtcgaaaccggtggacatgaccttttcgacagtgggcatgaccttttcgacagtatgcaataaatgcacaacgagatgttgtcatttttcgacgcagaatcatcttaacaagacctttccttgcccaaactgtggtcaggattcggccatgaccaatatatcatcgacagaggtgatcaatgggaggacattcatcagagtctctatttctccgcaacaagaagaaccatcgagggccaattctcaagcaactag

SEQ ID NO: 195794 - DNA, 616 bp, Arabidopsis thaliana landsberg
atggcagtctcgttgaagttaccagacttcattgccagctcgatgaagtcgctttttgtgatctgtacaatttacatccacaaaacaacaatgagaagacagagaaagagagaagagaggtggggatggaagagacatgatgaccttgagatgatcgggtgggcggtaacaggagaaatcgagaagaaaaacagaggaaggagtaagataatgatagatgaggaggatgaagaaggtagacaaagggaaagccaagattgggagaaatcgagaaacaaagatgaagagaagaagaagaggaggaaggaagaaacaaaaggtacgtgagagagagagaaggtaaatgtatccaagcttgacatatctcaaattatatccgaggaaatcaggactgcccttaggtgactttgacttaactccaccattcaccatctttgttgcctctttttccattttcactaagcatcaaaaccttgtggtctctcaataaataatcaaataaatatgagtcagtgtaacagaaagatggcttctttgctgcatgttaccgttgaagtggcgggttttgctgcatcattcagttggtgtggtgtaactaaaccaatgctcggttcag

SEQ ID NO: 195795 - DNA, 150 bp, Arabidopsis thaliana landsberg
atggtggttcacagagacctcaagcctgaaaacttgcttttggactctaaatgcaatgtaaagattgctgattttggcctgagcaacataatgcgagatggtcattttttgaagacaagttgtggaagtccaaattatgccgctccagag

SEQ ID NO: 195796 - DNA, 162 bp, Arabidopsis thaliana landsberg
atagaagtttcttcaatggaatccaattgcattcagttcctccaggacaagacgattcttgtcaccggtgttcccggtttcctcgccaaaggtaccgacatggatgatggatccattaccatacaaacaagtttttgtgattcagtccatacggttcattag

SEQ ID NO: 195797 - DNA, 411 bp, Arabidopsis thaliana landsberg
atggtgacagaaaactgcaaaagctctatccaaaaatggataaatcaagctcttaagcgtgtggggttggatgaagaagatgttgacgtaaaggaaaaagcagagcagagaagtcatctctcggctataaaaacagagagggggtcacagcataaatcactacacaagaacaaacagagcaagagaatcaaatagcaaaaactttgtattcttcaagagaccaagctttttttttcatcaatgtggttattggccatctctcttgtgggtcttcttgttgttgtggtctgtgtcttcctgaggttttcgaaagacaaaggtttggatggtattgtaaatgagaagaagagagataaaaattcagctcctcgtgtctcagcatcaggagaggatggtactaaaaatgagcag

SEQ ID NO: 195798 - DNA, 57 bp, Arabidopsis thaliana landsberg
tgcgacgactataagacaactgtgatcttatgtgacagtgcatcaacaattcaatag

SEQ ID NO: 195799 - DNA, 319 bp, Arabidopsis thaliana landsberg
ctaaatccaccgagaaactcgttgaccgccacgtgaaccactcccgcgcgaaagtttcaaaacggcggcgtttaaggaacctagcttggcgtacacgtcatctccgttgtattggataggacacgatgagctcggtttcaggagaaaatcgatgtgcaacgtggcggaagaggagggggaaacggttatggattcgacggagacgctggcgtggcataaaaggttgtacatctgtaagacgaggttcaaaccggttaagattaagattgtcaagaagccgcacaaacggggttttgaaatagctgatttctcttcttta

SEQ ID NO: 195800 - DNA, 132 bp, Arabidopsis thaliana landsberg
gtgtccaacatcatataccttgactctccagttggtgtgggattctcttactcaaacgacaacgctgattatacaactgatgatacaaaaaccgcgtctgatactcacacattccttctcgaggtagaataa

SEQ ID NO: 195801 - DNA, 671 bp, Arabidopsis thaliana landsberg
atgaacttcgaatttggccagtgggaatgtgtagaaggtaaaatggccaattgagagagacatttggcttcaggtccacacaaatatagttgtacggttttgaagaattttccaacttttaaagttttaattaataatttaaaagaagaaataaatgaattttaaagatgaaaaatgaatgaaaatttataggacccaacttttgttttgtctctatctcagaagttttcaaagatttgtgctttgtgatggtgtttttgggttctgcttttacttcaaaaaaaaaatattaggtaactaaaaactgtagagtaatcacagaatataccagagtttttaaaaatagttaaaaaaagatatggcttgtagcaaaactgtagtattaagtgggttgcaaatattggagaaaaaaaaaaaaaaaaaaaaaaagtgggttgaaaatatccacaaaacgtccaaaatacatttatcactagatctcccatgtcacccgttctcatgtgtgagtcttgtgaatttctctgactctctcatttcatcttctttgctttccttgttaaggctttgttttcatatatctttacgtcaacttaatttccggagaattaggtcatgccggcttcatgtaccagaaacgtcgttcatctcaatattttgcaatcttattttaa

SEQ ID NO: 195802 - DNA, 151 bp, Arabidopsis thaliana landsberg
tgggacgacccgttcttgttgaagcttcttgtcacgtccttttgggcgcgcagctatccgcgtcatgcatttatatcagcgctgctcattggcaatgaaagacgcagaagagatggcaagcagagcaagcagcttcttgcaagtgataatg

SEQ ID NO: 195803 - DNA, 541 bp, Arabidopsis thaliana landsberg
cttttcttgtgtgagaaacctaacttcatcgcatcttgccactttagtgtccgtttaagaccagcgatgctagagggctttaggttacttggtctgattctacttgtgcacttgaagattctagagagttatgtcggctctgtttctcgtggcgtgtgtcgaaggaccgccatgcgcgtgggctctttctgatgctgaaatctcttgtttttttgcctccactacctgtagccggtgatggatgaaggtggatgctttgatttccggtcctagagtctcgcatctcaagcgttggaagcttttgtttgtagatctgttttggggtgccttctttctggtgtttcaggtggtcgagcgtgctttcctatgctgtaatgtggtgtcgcctctcctccttaaccggtcacattttttccaagatctctcttggtctaacccctgcattttggctcttgcctgctggagttatgggtttctttgtgtcgagttgttcgcattgaggacaacttactcccacacgcttaaagcttttgtccacttt

SEQ ID NO: 195804 - DNA, 54 bp, Arabidopsis thaliana landsberg
atgactatagcataccctcctcctgcaattgctatcagtggaaccactcctaac

SEQ ID NO: 195805 - DNA, 879 bp, Arabidopsis thaliana landsberg
atggcgaactcctatttatcaagttgtgcaaacgtgatggttgaacggattaatacttctcaagaattggtcgaactatgtaaaggaaagtcctccagtgcattgctgaagagattgaaggttgctttggtgactgcaaacccggtgcttgcggatgctgatcagagagcagaacatgttcgggaagttaaacattggcttacaggaatcaaagatgctttcttccaggcagaggatatccttgatgagttgcaaacagaagctttgagaagaagagtagtagctgaagcaggaggcttaggaggactattccagaatctcatggctggtcgagaagccattcagaaaaagatagaaccaaagatggaaaaagtagttagactactggaacatcatgtgaaacacattgaagttattggattgaaagaatatagcgagactcgagaaccacaatggaggcaagcatcccggtcaagacctgatgatcttccacaaggcagattggtcgggcgagtggaagataagctagcgttagtcaatttgctgctttctgatgatgaaataagcattgggaaaccagctgttatctccgtagttggtatgccaggggttggaaagactaccttgacagagatagtttttaatgtctacagggtgaccgaacattttgaggttaaaatgtggatctctgctgggataaactttaatgtctttacggttacaaaagcagttctgcaggatatcacttcaagtgcagttaatactgaggatctaccttcacttcaaattcagctaaaaaaaacactaaaggggaagagatttttacttgttctggatgatttttggtctgaaagtgattcagaatgggagagtttccag

SEQ ID NO: 195806 - DNA, 93 bp, Arabidopsis thaliana landsberg
tgtagtcagtcgagtggcgttcgaaaggtgaccagtgacctccttgcagtcgtcgtgggtgaatgcgttgacgatgggagttctagtcgatga

SEQ ID NO: 195807 - DNA, 194 bp, Arabidopsis thaliana landsberg
tccttgatgagcggccagacttcaattgcagcatctccatttgagaaagcagcttcactcactacggatttgttggaaatccaattacatcgtcgaaagatgcagacaactcccaatggtttggatacgaaagggggacaaaccaagggagttgagctttcgcctccttcttcttctcctgtggcctcctcaga

SEQ ID NO: 195808 - DNA, 163 bp, Arabidopsis thaliana landsberg
tcccaagcccgggctcttccaagtcgtcgtcggcggcggcggcggcgatccgattcccggtctcagcgttcgccgttgtcgtcgccgcgactctgctctcgcactgcctcctctgaagatgcccgggtgtttggtggttttagttcatgatgatgagttgtga

SEQ ID NO: 195809 - DNA, 172 bp, Arabidopsis thaliana landsberg
atggcggcttgtgctctacgaagtaaaatctcctggtgttgtattctccatatccaggtccacttcttcctcctcggcttctacttcttcggcttcttcttcttcagcgggttgctcattgttgtcacgccatatagtatctcgactggtggtttgaagtcgatgttacctg

SEQ ID NO: 195810 - DNA, 1402 bp, Arabidopsis thaliana landsberg
atggctataaatagatcggcaagggcctcctctcatcccaccccaagccatttcatggcaactctcttccccccccccacacacccactccatgttccacacaagcacaaactagcacaaggatcgttcggtcgttcttcgatcgttcgtcccctgttattagtttgttcgttcgttcgtccgatcgttcatggttcgttcgttcgttcgtccgttcgttcgtccaaataatctttttcctaccgttatgctgccaaaattctgatcgatcgttcgttcgatcattcgatcgttcatcgttcgttcatagtccctattcatcgttcttccagataatctttgtcttgccgttatgctgccgagattccgatcgttcgttcgttcgatcattcgatcgttcatcgttcgttcatagttccctattcatcgttcatcgttcgttcatagtccctattcatcgttcttccagataatctttatcctgccgttatgctgccgaaattccgatcgttcgttcgtccgatcattcgatcgttcgtccgttcgttcgtccaaataatcttttcatgccgttatgctgccgaaattccaatcgttcgttcgtccgatcattcgatcgttcgtccgtccgttcatagttcctattcatcgttcatcgttcgttcatacgactattcactgtcactattcaccattactactcaccattactattcatcggtactattcacgtacactattcatcatcgttactatttatcattactattcatcatcgttactgttcatcgatgatatctataattacttttccatcgccactattcatcattactattcatcggtcatctagtcatcccaaatttcaactactcatccatcatgctgtccagtccacctaagaccagccagacccatattccagtcatacgaactctggtgactgtgattttccttccagtgggaacttcccatctggtcacccatcccaggtttctccaagttgagcatgcttaactttgagattccttcgaaccaggctcccaaactcagattccaataattctcgtttctaaattcttatcaaactattccctatccaaccatgtcatcccttaaacatggttcatattctagaaaactcccaaaatactcttgtcccatattctacctataactctcctgttcatactaagtcagacgattcattcgtcactattctcaccaacagtgaacttcactgtgctacaccacatacatccagctataaatacacccagctaccctctccctctccacacacactcaacaccctcagccaaggaaagcaccctacccactcagttactccgctcttccggctacacgcatagtgtcggttcgcctccagtccaccctcctg

SEQ ID NO: 195811 - DNA, 144 bp, Arabidopsis thaliana landsberg
cttcttttctgctttggtggaagaaataaactcaacaaagccacagacaagatgatcaatgatgtggacaacaattataagaatatcaacaatttctacatcactactgaaaaaaatgatggttggtgctactatacgacaaca

SEQ ID NO: 195812 - DNA, 523 bp, Arabidopsis thaliana landsberg
gcgaggataggcctggacaaggcgtggacgacgacacgactccaacgtacgacgacttcaccatcgagtacgtccacttagagggagctaggtgagtaggcaactcttcttcgagcagtttaccccagcccccaagtctccaccaactctagcaccacgctctctagctctggctataacgagctcttcgccaccacacaatctagccagcgctccgtctacaacaagctcttcgtcaccacgtactccagcactgatgataccctctccatgaacgtcatctctgacaccagcccatgtcaagcatgacccgatggagttcgtgaccccgctttcccacgacgaggagcgcgtcgacgcgtgctacgacggtgagccattgcggtatcgtacggtgggggccttctcatcgacccatcggtgtcgggcctgatgtctcgtactctggcaggagagttgaatcttgcatgcgatgatggcaagcctcggtctttcgaggaggccgagaaacatcgcggcttgg

SEQ ID NO: 195813 - DNA, 122 bp, Arabidopsis thaliana landsberg
aaaacgatcgatacgaatcgaagtcggagaaagaatcaatcgtcgtcttgttcgccggtttcagagagaaaccgaacacgcgtttccccaaagaaaaaaaagaaaaatgcgtaaaaaattaa

SEQ ID NO: 195814 - DNA, 522 bp, Arabidopsis thaliana landsberg
atgcagcaacggtggtggattctgagcattgagaagcaattccatgggtttgatctgaagagcaggactgatggtaagtaaagcaatgaagcaatctacaggaactctggttccccataagttgatggattcgagttttctgcatttgtttacaagaacaagaaggcctctctctgtcacatgacggcaacaccacattccgattgtctgcataaaggattccaatttcgaaagcgtgattctcatgaatctagagagtattatttggttagatgattgttgttaccttaagctgatggcagcgttctgcaattgcgaaaagagactcatcggtcataaatgttcctcctatgtttaggtgttgcagtgaggaagttcttgaaatctgtcaaatcaaaatcaagattgtctgaaatgattaaaccaaaaaaggaatcttcaagattgcagtgcacaaacaacggtgttagatttagccagttgaacaacaccagaatcagtaatggcggtcatgccccataa

SEQ ID NO: 195815 - DNA, 328 bp, Arabidopsis thaliana landsberg
atgtgggtgtgagttcgtgagttattcatacctttctgctatgagaaaaacatatctattgttgctggcgctgtgtggagggctgcttgtgtttgcacagaaagtgccttccattgtaggggcggggaaatccatcgatccttacaggtattccatcgagaaaaaagccatctaccggaaagcgtctgtcagcagtgcgcatccgctggccagtatggtgggtgctgccatgatgagaagagggggcaatgcctttgatgctgacatcgccacacaattaacgcttgccgtggtataccccggtgcaggcaatatcggctggcggcgg

SEQ ID NO: 195816 - DNA, 460 bp, Arabidopsis thaliana landsberg
atggactcagaagaaactaatccaataatgagctcttcgcctccgggaagaatatctctccggccgatgactctttccgacgtcgatgactacatggtttgggccacagatcctaaagtggctcgattttgcacttgggagccttgcacgagccgagacgaagctatcaaatacataaccgatcgtgtcctgacacacccttggctccgagccatctgcttagaagacgaccgtccaatcggctacatcttgatcatggcggttgataacatcagaaaagagattggttatgtcctagcgagaaagtattggggaaaagggtttgccacggaagcagtgaggctagtgaccgcggaggtattcgaggaatttccagagattgaaaggcttgaggcacttgttgatgtggacaatgttggatctcaaagggttcttgaaaaagttgggtttactagagaag

SEQ ID NO: 195817 - DNA, 1097 bp, Arabidopsis thaliana landsberg
atgtggaggattagagggtatcctatacattatcgacaaacatctgtaactaaacttacattccatgaaaaaggcaagcaacctgtttatgtcaaggaaggtgagactgctgaatctgttttgtatagagtgaacaatgatgagactcagtttactgcatggttcgagcttaataagcgtgatccgggagcggtaaaacttttatatgaacaaatacctaatttctatacgtggaatggtaaagataaggattttcgcagaagaaaaatgccaggttttgctgttggtagaataaatcatgtacctccaaagatagatgatgcatatcaccttcgcatctttattaacaacataaaaggtccaaaaggttttgatgatatcaaaaccgtcgagggtgttgttcataaaacatacagagatgcatgatatgctctaggtttgcttgatgatgataaggaatatatccacggtattgaggaggctaatttttggtgttctcctaagtatgtttgcaagtagtttgttatcctgcttatttccgaaagcttgagttccccagccgttgcattggaacacacttggaagatactgtctgaagattttcagaggaaagtaaaagataagttaaaacgtgcaggttagttaaattatattttaaaatgtaatatacaatttttaaaatgttgttttacatattttattacattcaacctaatattaatgtatatgcaaaatacatattgcctgacgaagataagattcggttatgtttacaagagctgcaaaaaatattgaaacgacatggaacagatctttggaggtataagttgttgccgcagcttgaacctggcgataaacctgcctttaatcagttgatcctcgatgagcgcaactacaatcttgaatcattgaaaaaaaaacatgataattggttaaagatgctaaccccggagcaaaagaaggtatatgatgaaattatggatgctgtccttagcgacaaaggaggtgtttttttcatatatggctttggacgaacaaagaaagccttaaagtggaagattctatccgcagcgataagatgtgaaggagatatttga

SEQ ID NO: 195818 - DNA, 874 bp, Arabidopsis thaliana landsberg
ataactatatgtgtgactcacattgtacaacgaacagaggcgatacttgaaaacagttttcttcaaaccaacaccggcggttctctcctccgaccggcgctggcctctccggcgtcggtagattctatgttttctcttttccatttttttattttgttattgttgttgttaggttttatgcaataactcgagaatgatagcgatgatgatgaaatcgtgttcgtcattacgttggaatggtgttttactgttttccggtgaatctattgtggtttcttatgttgttacactatttctatgtcggttcgtgttctcggaatgtatgtttagtcaccggcgatttcgattcaaccgttgttttgctatgtccggcgattgcctcgtgaatcttttggctttgttagccgtgtgtttggtcatactaacatctgatgttagttatgcgatagttcccgggcgtcagtatgatctactatgggcgttccgaagtttaacacaaatcctatcggatttgatatgtcaccatcgaccggcacggaaaccaccatggaggcaatatgttgaggaggagttggaggctaataggagaatcagaagatggtttataccatatcaacaaaaatggggtttaagaaaaaccaagattaatgacatttctttctatatgagagtttcgatcaattcgaaggttttgcgatgtaacagatggatcgctgcctatgattttcgtatgcgttaccggtatttcatctataaaaagaagatgattcccaagcaagaaagtcacaccaaattgacggaaatgatgaagacgattaaatatttgattaagaaagcagagcgtaatttactttatcgtttcttcattatataa

SEQ ID NO: 195819 - DNA, 54 bp, Arabidopsis thaliana landsberg
atggttaagcgtccaccactacccaaatggaatcgtagccggctcgagtgtgag

SEQ ID NO: 195820 - DNA, 291 bp, Arabidopsis thaliana landsberg
atgttaaccgatttggttaacgctgttaacggccgttacggcgaagggaggtaatcggaaaaaaataatacatcgtgttttttatttccaacccaagttagtttgtatatttttttgacaacgaaaaaagcttacgtagttttctgacatattttaaatagttcggattttttcgggaattttcccaataattttatgatttcacttttttttattagaataagtctgaaaaagatgaggaagaaagaaaaactcatggactctcctcttcgcatatatgtctttcagtga

SEQ ID NO: 195821 - DNA, 365 bp, Arabidopsis thaliana landsberg
cttccatttttgcaagccaagatacgaaaggagcatctacaacccaaaacccagagaaagttctccgcaaagagaagagctttagtagctgcgaagaggaaacagagagacgttcatcacggcggggaagctcagccacagagcctccattgatggaggtaacaaagggttttaagaaatggttttttctcaagcaacgacctttatcagttaccattacttcttctctctcttcaatgagaagactcgacgatgacgatgcgttctccatctctcaagatgatgaagaagcaaatgattcaggaaaaactagggattttgaaagtcaaaatcggagacttgaagaaggaatcagtttttgctaa

SEQ ID NO: 195822 - DNA, 296 bp, Arabidopsis thaliana landsberg
atgactagtgatagggtaggaaaggatggcagaacctattgtaaccctacaacgtctgaagttgcagctttgattcctggagactttcgtcctgaaatgcctacacgtgatattatcgttcaagataagaaaacaggacagctatcaagaataagcgaagttcatccttcttatgtcccaatgcaatatcctctcatatttaattatggtgaagatggttttagaccaggaatacagaagggatatacaggcaaaacaggaaaacaagcaaacaagtgtataagtatgaggcaatg

SEQ ID NO: 195823 - DNA, 69 bp, Arabidopsis thaliana landsberg
tctctaaagaaagaaagacgtatagaacttaatatcggtaatacgcgtaacgcgttcatccaaatttaa

SEQ ID NO: 195824 - DNA, 90 bp, Arabidopsis thaliana landsberg
atgggtgacggcgctcaaccctccatggccgacgtcatgcagatgctccagaccctgtccaccaacatgtccaagatgcagtccgacaag

SEQ ID NO: 195825 - DNA, 2907 bp, Arabidopsis thaliana landsberg
atgaaacggatccaatccggtcccaaaccaccgaaatctcgccggtgagacacttgagatcgaaatacagagttcttccgattgaaaaacacctatagtcaaagaggagacattcgagaattctaaaaatatcggaggttaaggtattaacagtcctgcaggtaagatgcggtattacttgaaagcgagattggactcaccacattgataatcaccaacggagctaaacttgttagtagtcgcctcagatattgtggatgagaaagaaccaaggcaagtttcggaggtgccaaaagggtaaatagatcaacaattagatatattctgtgtttgggaatctgatatctgtttttctatttttgggtctccagggtatcagagggtccacaattggaaaacaacaagatgagagtcattgtattagtaagctcgatattcatctcatggtgagaaatctgtcccttctagattttagctataaacagtgtgaatgctgctaatgtagtaaagatccttgtcctgtcattaggttcctccaacattgccttcctcttcagggagagtttctcttctcccactcgtttcttattattgcaaggcaagtgttgatttaaatagcttgctttgtttaggatgcccctatttggttttctaagactgtttctgtcttgctttatgcagcgagatagtgctctaaagagcaaagagaagattactgtcaagaatgagatgaatccagaagaagtcaaacaaaagaaggttgataaacgtgactggctgaatcttgatatagaggggccgaatcaagagaccgacagagactctaatttaagattacagaatttggattggagccaacctcagcaggctaaatctggtaatatgattatgaataccaaccaagttctggttgtttaagttgatgatttttctaggatacacagatttaccttgtctgacctatgtctacatcattctcagctccgcacagttcagtcttacctttgccagtagctgtagccagctggcctagcggggttcctcctcaggggtgagttctgaaagccctaatctctcttaggttatcttgtgcttacagcttaatggtcagaccctaaaaggaaaaaacattggcagacatgtagccctgatccagaccggtaaacctgtggatgaaagcaatggatcttctaaattagtgcaggtatattctgttctaattacatttgttcttcaatatgatgatcattgtttcttctactggttaggaccatgatttgttaacaaattcagggtgctccaatttctgcctctcagcctaggcctaaaaggtgtgccacacactttttcatagctcggaacattcagctacataagcatttcctcaaaacaaaccatctccctacaccaaacaaaggttctgtttatctgaaaggtggtgacttgaggccaaccgctggaaacccatccttgcatggaagctctcctattctcagtttaaactcccaaccacacgttagaaacggagataatatttctgcgcctaatgttaaagcctctgaaagtggtcattttgcctcaaccagacagaataaacctcaaccaccccctgcatcaattagtgtagtggtatgtacttcgttggctttttatcttatcatgaatttgtgtttatcgcattagatttttattgaaactgcaaaactgctctcctgaataaaatcatctttctctcttaacacagcctgctccagcttttatctaccccgcaaaccaccatttgcaaccagtcatggtaccttctaaatcatctcgcccaaccaagagcccccatttggctgttggtttagcatctgctaacttcagccatccaagttcatcagccagcgaagtttcttctccatacttaacagttattccaaacaatgcatattcctttcaactgtcatcaaccatcagaggtgggactccaagccaggcggtgcctttctacaatgggtctttttactcgcctcagatgttccaacaacctcctcagcctctgcagagacagagtcaagcccagagggagtcaaaggcatcaagctgttcctcatcttcccacaggcaaccgcaagttagtgtgaatagtctttcaagccaagctaatgttcagcaacaccgtcaaatgtcacaaaagtttgaggtagctggagttaacactgattcaaggggtagccacactcagaaaggaggcccatttggccagatcatggcagcccctgttcagccacaaaacttttccatgtcgtttgcgtctatcgccagcagtgctccccctgcaactctgaatttttcctccaatggctatcacatctctacacctcctggtgttgctcaccagaaaaaccatcaatcaagtgaggcaaagactggaggtggaagctgttcaagcaatgccgaagacccgaaaaagaatcttcaagggaagcctcaagggatgatgaatggacatacgctggtttttgacaatccatcgagaaccctcaactttgtttctggtctttggcctcctcctgcagcaacagcaataaacggagacccttcagtgtttacgcagcatctcacgcagaggcagcagcaatctggtcggagtaaaatgatgatgactcattcgcaggctgactctgtttctgccacgtcatcccagtggaaaaaccctgcaacctcatcatcactcacgtcgtgtacttccttaaacctcaagcagttccagtcgcagcagcagatcagaacacacggacagacacagatttcttttgcagcaccaacaaatccgcagccttctcaggggaaacaggggagatctggtggctcttctccttcagtcactgggtctgcttcacatggcaaaccagcgaactctaa

SEQ ID NO: 195826 - DNA, 879 bp, Arabidopsis thaliana landsberg
atgtcgcccgatgattcgttctccgatcagaaagatcagaactcagggatcttctatgaggatgtgaccttccaagatgttctcttcgactcaagattccgaggaggtggtattttggtgattgactcagctcgcatccgtataaccaattgctacttcctccatttcacaacgcaagggattaaagtccaaggaggtcatgagacatacatttcaaactccttcttggggcaacattcaacggtaggaggagacagagaagaaagaggatttaccgggacaggaatcgatatctcgagtaacgataatgccattacagatgtagtgattttctcggctggtatcggtatctctttaaacggtggagcgaatatggttacgggtgtgcattgctataataaagctacatggtttggtggaatcggcattctagtgaaatcacatttaacaaggatagacaattgttaccttgattacacaggtatagtcatagaagatcctgtccatgttcacgtcaccaatgctttgttcttaggagatgcaaacatcgtcttgagatcggtacacgggaagatttccggtgtaaacatcgtcaacaacatgtttagcggtaccgccaaaaacaacttcccgattgtcaagctagaaggagagtttcatgatattaatcaagttgtgattgatcaaaacaatgcagaagggatgatgctgaaatcaacaaccggaaaggccatggtttccgcaaatggaacacgatggatcgctgatttttcccctgttttggtattccctaaccggataaaccattaccagcattcgtttttcgctcaatccggacagatccctgcaaatgcagtgaccaatgtctccaacaatgtg

SEQ ID NO: 195827 - DNA, 200 bp, Arabidopsis thaliana landsberg
atacgtgccggaaatcggtagcagaagaaatatagatagttgcagcatctgcatctttaatttgaaaagcagtatcgccggggatcagctggccgccgacatgtttgatcctgaccctggacagataccgtatgcccttcccgtccgtgccgttattcaattgccctgccatatccagatcattaccatgtactgcggtg

SEQ ID NO: 195828 - DNA, 962 bp, Arabidopsis thaliana landsberg
atgacgcagatgctttccgtactccgccgcaaccttcaaaaccttcgtaagagccctcgcgtagctgacgataccgagttaccttcatcgactagtggcaccgggccgggagttgtagctaatggaagacgagacgggtttaactccgtgatcatgcggttcccgttctcgatcatctcttgctttgcggtgccccgtgttagcgggacagatggactatgggtgtccggagattatggtagcgtctcggaggttaaccatcttatggttagtgatagtatgagatacgccattttaatgtaataaacatacttatagtatagttttgtgtttttcttctttctttcttatctctacaatacgattaattttcttctcgatcttacctttgtatagtgttaaatctatgagatgtagaacaagttttgttcgtgtatatagaatgaagattttattattgtagaatgaaggttttatttttgtatatgtatttgtagcatataagttaagctttttagactttttttccacttttttttttgcctacttttttttgctttcctataatcaatcatgaaatacctaattcttactttctttctcctatattcttacttcctacccccatttttaatttaaaataattctcaatacgtatttccattttctagtttttaagttaaaattacagaaatctctaaaccattggtataaataaataaaattgaataaattcaaaatatggtcttttaatataacttggtgatcttgggccgaaactcaatctaattctcggtaaaattgagttatgttttgccatttgatgtgtgcaaaatggttttttttttgttggtatagacgtgcacaattgtttgtgttaagtctttcaatctttaaatcctaattatgttccatgcccataggttcgcattggtacgtgcaaattcaaacatatagaataa

SEQ ID NO: 195829 - DNA, 102 bp, Arabidopsis thaliana landsberg
ctcccacagtgtgacggttttatgagcagtggatcgcagaatacaattactataaaaccggtatcgcaacattcgatagcggaatatgcaaacatgaaataa

SEQ ID NO: 195830 - DNA, 454 bp, Arabidopsis thaliana landsberg
taccgccggaacagcggacacggtaggtgcggtcgccgccgcgggactgcagttgccagccctgccggtgcgcgagggcgccaaagcgctcaccggtgtcgccacactgctggtcagacgggcctggcacggcgagcagcgcgcatggatcgaggttcccggcctggccggccccgacggccccgagcgcggcgagcgcgtgctcaccgcgctcgccggtcggcacggggtgatatcggccggcctgaaccacccgctggaacgggtggtgatcgagttgaaccccgccgccaatgcggcgccgtcgctgcgtgagctgtgccgtctgctcgacaccgtcgacccggtcacggtgcagccttgcgccgatcgcactaccctgcccggcgacccactgctgcttctcacccgcggggtgatggtcgcggtgaacaccgccgggctggcgatcgcg

SEQ ID NO: 195831 - DNA, 196 bp, Arabidopsis thaliana landsberg
atggatgaacttatgtctgagaactccaaactcaagctgcagcagcagtccttggaaagcacgatgaatttgctcaagaaccagcttgaaggtagagagaaaatgatcatggaatatcagaagcgttacgagagtgccatcaatgatatatgtaagctttcagatcaattcaaaatccggattaattccatggaaa

SEQ ID NO: 195832 - DNA, 405 bp, Arabidopsis thaliana landsberg
gagtccatgatgcgagatatgaccgaaaccccgggggatacccccgccttgctgcaaacgctcaacagccgttgggatgaagccttcaatagccagcagccgaccgtgctggcggcgctgtacgatgacgaggctacggtgatgccagcgggtgctgcgcccgcgaacggcggtcgggcgatccttgagttctggcgcaacctcattgcgcagggtgtcgtcgaccataagatcgagatcgtcgaaaccatcgtcgacggcaacctgggcgtgcagcgcggtgcctggagcgctgctgcggtcgatgccgcaagccagcgccagacgttccgcggcaacttgcagctggtgttccgtcgacagatcgacggtagctggaaaacctacacacacatctggaactaa

SEQ ID NO: 195833 - DNA, 753 bp, Arabidopsis thaliana landsberg
atgcttaaagacataaacgcaggtaaacgataatattgcataagtaaagagataaagagtagtgaaacaagatgacagatgaaatcaaatgcggaatctaaataacttggaaaaatattgaattacaggttgtagaagcaaaagcggcgcagccagagtaaattaaaacagaaaataaaactgaagcaaaaactcaatgtcgactagatgtctccggacagaaccctaagacatctatttatacaaaacgaaataaaatgatagtagacgggccaataacctaatcgcccggcccatagaatgataatgggctgagatgggcttcgtgatccgatggaggtccaggccgcttccaaacactttgtcttctcctcttctcttccttgtgctcagcttgtctggttgagtgcggatttgagtagactatgaagatgtgatcgagtgtccggtcgagtgatggtgttggtggtgagtgatgatactcgaccagggggtcgagtaacgtggtagagtgaacagccgagtgaggtcaggtggtgtggcgaagtgatactcgaccagggggtcgagtggcgtcatcgagtggcctgagctgaggatactcgacctgggggtcgagtagatgggaagaatggctccaaagtcactcgaccagggggtcgagtagatgggaagaatggctccagagtcacgacctggtggtcgagtatggtgttggatgcacacgacctggtggtcgagtatgtcttctag

SEQ ID NO: 195834 - DNA, 166 bp, Arabidopsis thaliana landsberg
aaattcctcgtttgtaattcaagtgctttgttctcgtcgtcttgactgggacactgatgaaaaggatactgagagagccattttctggatatatcaagaatctaagagcatcttcatcggcaaaagtggtagagaatctcaaaaaataaataaattaatattttaa

SEQ ID NO: 195835 - DNA, 896 bp, Arabidopsis thaliana landsberg
atgaggaagggaacgaagaagagaggaggttcgagaggaggttcgcgaggaggccgtaaaactggtgcgtcttcgtcggcgagtaagaacgatgatgcggtggtagaggccacgacgacgcaggagacacagcctactcaggagacagaggaaacggaggataaggtggaatctccggcgcctgaggaggagggaaaaaacgaagaagaagcgaacgagaatcaggaagaggaagcggcgaaggttgaatctaaggctgcggaggagggagggaacgaagaagaggcgaaagaggacaaggaggaggaaaaagaagaagcggcgagagaagacaaagaggaggaagaagaagcggtgaagcctgatgagagtgcgagccaaaaggaggaggcgaaaggtgcgtcgtcttcagaaccgcagcttcgtcgtggtaagcgtaagagaggcacaaagacggaagcggagaagaaagtatcgactcctagagccaagaagcgagccaaaacgaccaaggcgcaagcatctgagcctgagtacttcgaagagaagcgtaatctggtattctattttccttatcttctggtttggatttgttactcgcctttcgctgacttgttgtgtgtgtgtgtttaacgattacgaagttagatctgagatattttcttacgttttgttgttcttgcagaatgttataattatagcgtcttggatagaaacttttcttgaagatttgtgtgatgtttctttcatagaattataatttcttgtcgtccccatgatgttttgctcagaaattttggaacattttgagttttatgaacctttgttttggttttcatgtttgttttgtataacaggaggatttgtggaaggctacattttcagtgggaacggag

SEQ ID NO: 195836 - DNA, 1253 bp, Arabidopsis thaliana landsberg
gccccccaatcgtgtggggttgttcatacctgcggaggtggaaccggggttctgtttgtaatggcaccttgaatgccggtcttttgttcattgtggctgtcagggcctgaacatgtatgtatttttggcgtggaccgtgttttttcctcattttcgagcactaagactcgcctgttggttatctgaaccgcttcaccaagcgtgagtcgcctcgtgcgaaggtgacgagtgaggtatccgtatcccggaggcgtaggagtccctcggctcggtcgaccttgttgtccgaggcttctcttgcttagttaaaggaacccctcggccgctcttcgatgagccaaagccgggggtagtggtgtcggctcgaacagaggcagagttggcttcgaaaagaagacttggtcggccggagcctggccgggtcgtccgttagcgggaccgacgccggagttgatcttccgaggcctcaggcgcagctgatgtcttcgggggacagctggccgaggctcggggtgaccagccgagccgcctgctcgggccggattctcggagaagactctagcggtgatggccccggcgtggtgatgacggtcgtccttcagagtggagatcctcggagcacgtcgccgtccgaggctaggtcaaacctcgccgaaagtgttgtcgacgccgagggtgctgcggctcccttcaactgtccagatccgagcatgcaggattggattatcttgtagtgtgtgttttttgcggccgccgaggcccaaacatatcgtcgtcatgttgtaaagctgcgtctcttttcccctgtttcgagtatctggacttatttgtcggtaacagaattgtttgtccgagcgagagttacttttcgcggaaggtgatgagtgaggtatccgtatcccgaaggcgtaggagtccctcagctcggtcggccttgccgcttacgtgtgctcttactcgtccgtaggattctgttatcgatatagtcgagaaggcacgaaaaatcgtttcggcagaaaagttttcgagcattaagacttgtttggtcagcggaatcgcttatccgagcgtgagttacttatcgcagaaggtgatgagtgaggtatccgtatcccggaggcgtaggagtccctcggctcggtcggccttgcctgcttacgtgtactccgtcattttcaggatcccactttcgaagtagtcgaaaagcacgaaagatgttccggcagaaagactttttccgaggaaaattttga
